(19) United States
(12) Patent Application Publication
(10) Pub. No.: US 2023/0174974 A1
(43) Pub. Date: Jun. 8, 2023

(54) DIFFERENTIAL KNOCKOUT OF AN ALLELE OF A HETEROZYGOUS BESTROPHIN 1 GENE

(71) Applicant: EmendoBio Inc., Wilmington, DE (US)

(72) Inventors: Lior Izhar, Tel Aviv (IL); David Baram, Nir Zvi (IL); Joe Georgeson, Rehevot (IL); Michal Golan-Mashiach, Ness-Ziona (IL); Asael Herman, Ness-Ziona (IL); Rafi Emmanuel, Ramla (IL)

(73) Assignee: EmendoBio Inc., Wilmington, DE (US)

(21) Appl. No.: 16/203,094

(22) Filed: Nov. 28, 2018

Related U.S. Application Data
(60) Provisional application No. 62/680,482, filed on Jun. 4, 2018.
(60) Provisional application No. 62/591,365, filed on Nov. 28, 2017.

(51) Int. Cl. C12N 15/11; C12N 9/22

(52) U.S. Cl. CPC C12N 15/11; C12N 9/22; C12N 2310/20; C12N 2800/80

(57) ABSTRACT

RNA molecules comprising a guide sequence portion having 17-20 nucleotides in the sequence of 17-20 contiguous nucleotides set forth in any one of SEQ ID NOs: 1-3010 and compositions, methods, and uses thereof.

[0001] This application claims the benefit of U.S. Provisional Application No. 62/680,482, filed Jun. 4, 2018 and U.S. Provisional Application No. 62/591,365, filed Nov. 28, 2017, the contents of each of which are hereby incorporated by reference.

[0002] Throughout this application, various publications are referenced, including referenced in parenthesis. The disclosures of all publications mentioned in this application in their entireties are hereby incorporated by reference into this application in order to provide additional description of the art to which this invention pertains and of the features in the art which can be employed with this invention.

### REFERENCE TO SEQUENCE LISTING

[0003] This application incorporates-by-reference nucleotide sequences which are present in the filed named “220803_90240-A_Substitute_Sequence_Listing_AWG.txt”, which is 552 kilobytes in size, and which was created on May 23, 2022 in the IBM-PC machine format, having an operating system compatibility with MS-Windows, which is contained in the text file filed Aug. 3, 2022 as part of this application.

### BACKGROUND OF INVENTION

[0004] There are several classes of DNA variation in the human genome, including insertions and deletions, differences in the copy number of repeated sequences, and single nucleotide polymorphisms (SNPs). A SNP is a DNA sequence variation occurring when a single nucleotide (adenine (A), thymine (T), cytosine (C), or guanine (G)) in the genome differs between human subjects or paired chromosomes in an individual. Over the years, the different types of DNA variations have been the focus of the research community either as markers in studies to pinpoint traits or disease causation or as potential causes of genetic disorders.

[0005] A genetic disorder is caused by one or more abnormalities in the genome. Genetic disorders may be regarded as either “dominant” or “recessive.” Recessive genetic disorders are those which require two copies (i.e., two alleles) of the abnormal/defective gene to be present. In contrast, a dominant genetic disorder involves a gene or genes which exhibit(s) dominance over a normal (functional/healthy) gene or genes. As such, in dominant genetic disorders only a single copy (i.e., allele) of an abnormal gene is required to cause or contribute to the symptoms of a particular genetic disorder. Such mutations include, for example, gain-of-function mutations in which the altered gene product possesses a new molecular function or a new pattern of gene expression. Other examples include dominant negative mutations, which have a gene product that acts antagonistically to the wild-type allele.

### Best Vitelliform Macular Dystrophy

[0006] Best vitelliform macular dystrophy is commonly a slowly progressive macular dystrophy with onset generally in childhood and sometimes in later teenage years. Affected individuals may initially have normal vision followed by decreased central visual acuity and metamorphopsia. Individuals retain normal peripheral vision and dark adaptation. Best vitelliform macular dystrophy is commonly inherited in an autosomal dominant manner, although, autosomal recessive inheritance has also been reported. Mutations in bestrophin 1 gene (BEST1) have been associated with autosomal dominant Best vitelliform macular dystrophy.

### SUMMARY OF THE INVENTION

[0007] Disclosed is an approach for knocking out the expression of a dominant-mutated allele by disrupting the dominant-mutated allele or degrading the resulting mRNA.

[0008] The present disclosure provides a method for utilizing at least one naturally occurring nucleotide difference or polymorphism (e.g., single nucleotide polymorphism (SNP)) for distinguishing/discriminating between two alleles of a gene, one allele bearing a mutation such that it encodes a mutated protein causing a disease phenotype (“mutated allele”), and the other allele encoding for a functional protein (“functional allele”). In some embodiments, the method further comprises the step of knocking out expression of the mutated protein and allowing expression of the functional protein.

[0009] According to embodiments of the present invention, there is provided a first RNA molecule comprising a guide sequence portion having 17-20 nucleotides in the sequence of 17-20 contiguous nucleotides set forth in any one of SEQ ID NOs: 1-3010.

[0010] According to embodiments of the present invention, there is provided a first RNA molecule comprising a guide sequence portion having 17-20 contiguous nucleotides set forth in any one of SEQ ID NOs: 1-3010.

[0011] According to some embodiments of the present invention, there is provided a composition comprising an RNA molecule comprising a guide sequence portion having 17-20 nucleotides in the sequence of 17-20 contiguous nucleotides set forth in any one of SEQ ID NOs: 1-3010 and a CRISPR nuclease.

[0012] According to some embodiments of the present invention, there is provided a method for inactivating a mutant BEST1 allele in a cell, the method comprising delivering to the cell a composition comprising an RNA molecule comprising a guide sequence portion having 17-20 nucleotides in the sequence of 17-20 contiguous nucleotides set forth in any one of SEQ ID NOs: 1-3010 and a CRISPR nuclease.

[0013] According to some embodiments of the present invention, there is provided a method for treating Best Vitelliform Macular Dystrophy, the method comprising delivering to a subject having Best Vitelliform Macular Dystrophy, a composition comprising an RNA molecule comprising a guide sequence portion having 17-20 nucleotides in the sequence of 17-20 contiguous nucleotides set forth in any one of SEQ ID NOs: 1-3010 and a CRISPR nuclease.

[0014] According to some embodiments of the present invention, there is provided use of a composition comprising an RNA molecule comprising a guide sequence portion having 17-20 nucleotides in the sequence of 17-20 contiguous nucleotides set forth in any one of SEQ ID NOs: 1-3010 and a CRISPR nuclease for inactivating a mutant BEST1 allele in a cell, comprising delivering to the cell the composition comprising an RNA molecule comprising a guide sequence portion having 17-20 nucleotides in the sequence of 17-20 contiguous nucleotides set forth in any one of SEQ ID NOs: 1-3010 and a CRISPR nuclease.

[0015] According to embodiments of the present invention, there is provided a medicament comprising an RNA molecule comprising a guide sequence portion having 17-20 nucleotides in the sequence of 17-20 contiguous nucleotides set forth in any one of SEQ ID NOs: 1-3010 and a CRISPR nuclease for use in inactivating a mutant BEST1 allele in a cell, wherein the medicament is administered by delivering to the cell the composition comprising an RNA molecule comprising a guide sequence portion having 17-20 nucleotides in the sequence of 17-20 contiguous nucleotides set forth in any one of SEQ ID NOs: 1-3010 and a CRISPR nuclease.

[0016] According to some embodiments of the present invention, there is provided use of a composition comprising an RNA molecule comprising a guide sequence portion having 17-20 nucleotides in the sequence of 17-20 contiguous nucleotides set forth in any one of SEQ ID NOs: 1-3010 and a CRISPR nuclease for treating ameliorating or preventing Best Vitelliform Macular Dystrophy, comprising delivering to a subject having or at risk of having Best Vitelliform Macular Dystrophy the composition of comprising an RNA molecule comprising a guide sequence portion having 17-20 nucleotides in the sequence of 17-20 contiguous nucleotides set forth in any one of SEQ ID NOs: 1-3010 and a CRISPR nuclease.

[0017] According to some embodiments of the present invention, there is provided a medicament comprising the composition comprising an RNA molecule comprising a guide sequence portion having 17-20 nucleotides in the sequence of 17-20 contiguous nucleotides set forth in any one of SEQ ID NOs: 1-3010 and a CRISPR nuclease for use in treating ameliorating or preventing Best Vitelliform Macular Dystrophy, wherein the medicament is administered by delivering to a subject having or at risk of having Best Vitelliform Macular Dystrophy the composition comprising an RNA molecule comprising a guide sequence portion having 17-20 nucleotides in the sequence of 17-20 contiguous nucleotides set forth in any one of SEQ ID NOs: 1-3010 and a CRISPR nuclease.

[0018] According to some embodiments of the present invention, there is provided a kit for inactivating a mutant BEST1 allele in a cell, comprising an RNA molecule comprising a guide sequence portion having 17-20 nucleotides in the sequence of 17-20 contiguous nucleotides set forth in any one of SEQ ID NOs: 1-3010, a CRISPR nuclease, and/or a tracrRNA molecule; and instructions for delivering the RNA molecule; CRISPR nuclease, and/or the tracrRNA to the cell.

[0019] According to some embodiments of the present invention, there is provided a kit for treating Best Vitelliform Macular Dystrophy in a subject, comprising an RNA molecule comprising a guide sequence portion having 17-20 nucleotides in the sequence of 17-20 contiguous nucleotides set forth in any one of SEQ ID NOs: 1-3010, a CRISPR nuclease, and/or a tracrRNA molecule; and instructions for delivering the RNA molecule; CRISPR nuclease, and/or the tracrRNA to a subject having or at risk of having Best Vitelliform Macular Dystrophy.

### DETAILED DESCRIPTION

### Definitions

[0020] Unless otherwise defined, all technical and/or scientific terms used herein have the same meaning as commonly understood by one of ordinary skill in the art to which the invention pertains. Although methods and materials similar or equivalent to those described herein can be used in the practice or testing of embodiments of the invention, exemplary methods and/or materials are described below. In case of conflict, the patent specification, including definitions, will control. In addition, the materials, methods, and examples are illustrative only and are not intended to be necessarily limiting.

[0021] It should be understood that the terms “a” and “an” as used above and elsewhere herein refer to “one or more” of the enumerated components. It will be clear to one of ordinary skill in the art that the use of the singular includes the plural unless specifically stated otherwise. Therefore, the terms “a,” “an” and “at least one” are used interchangeably in this application.

[0022] For purposes of better understanding the present teachings and in no way limiting the scope of the teachings, unless otherwise indicated, all numbers expressing quantities, percentages or proportions, and other numerical values used in the specification and claims, are to be understood as being modified in all instances by the term “about.” Accordingly, unless indicated to the contrary, the numerical parameters set forth in the following specification and attached claims are approximations that may vary depending upon the desired properties sought to be obtained. At the very least, each numerical parameter should at least be construed in light of the number of reported significant digits and by applying ordinary rounding techniques.

[0023] Unless otherwise stated, adjectives such as “substantially” and “about” modifying a condition or relationship characteristic of a feature or features of an embodiment of the invention, are understood to mean that the condition or characteristic is defined to within tolerances that are acceptable for operation of the embodiment for an application for which it is intended. Unless otherwise indicated, the word “or” in the specification and claims is considered to be the inclusive “or” rather than the exclusive or, and indicates at least one of, or any combination of items it conjoins.

[0024] In the description and claims of the present application, each of the verbs, “comprise,” “include” and “have” and conjugates thereof, are used to indicate that the object or objects of the verb are not necessarily a complete listing of components, elements or parts of the subject or subjects of the verb. Other terms as used herein are meant to be defined by their well-known meanings in the art.

[0025] The “guide sequence portion” of an RNA molecule refers to a nucleotide sequence that is capable of hybridizing to a specific target DNA sequence, e.g., the guide sequence portion has a nucleotide sequence which is fully complementary to said target DNA sequence. In some embodiments, the guide sequence portion is 17, 18, 19, 20, 21, 22, 23, or 24 nucleotides in length, or approximately 17-24, 18-22, 19-22, 18-20, or 17-20 nucleotides in length. The guide sequence portion may be part of an RNA molecule that can form a complex with a CRISPR nuclease with the guide sequence portion serving as the DNA targeting portion of the CRISPR complex. When the DNA molecule having the guide sequence portion is present contemporaneously with the CRISPR molecule the RNA molecule is capable of targeting the CRISPR nuclease to the specific target DNA sequence. Each possibility represents a separate embodiment. An RNA molecule can be custom designed to target any desired sequence.

[0026] In embodiments of the present invention, an RNA molecule comprises a guide sequence portion having 17-20 nucleotides in the sequence of 17-20 contiguous nucleotides set forth in any one of SEQ ID NOs: 1-3010, 1-714, or 715-3010.

[0027] As used herein, “contiguous nucleotides” set forth in a SEQ ID NO refers to nucleotides in a sequence of nucleotides in the order set forth in the SEQ ID NO without any intervening nucleotides.

[0028] In embodiments of the present invention, the guide sequence portion may be 20 nucleotides in length and consists of 20 nucleotides in the sequence of 20 contiguous nucleotides set forth in any one of SEQ ID NOs: 1-3010. In embodiments of the present invention, the guide sequence portion may be less than 20 nucleotides in length. For example, in embodiments of the present invention the guide sequence portion may be 17, 18, or 19 nucleotides in length. In such embodiments the guide sequence portion may consist of 17, 18, or 19 nucleotides, respectively, in the sequence of 17-20 contiguous nucleotides set forth in any one of SEQ ID NOs: 1-3010. For example, a guide sequence portion having 17 nucleotides in the sequence of 17 contiguous nucleotides set forth in SEQ ID NO: 1 may consist of any one of the following nucleotide sequences (nucleotides excluded from the contiguous sequence are marked in strike-through): AUCCGUCAGGUUAAACUCCA (SEQ ID NO: 1)
[0029] 17 nucleotide guide sequence 1: CGUCAGGUUAAACUCCA (SEQ ID NO: 3011)
[0030] 17 nucleotide guide sequence 2: CCGUCAGGUUAAACUCC (SEQ ID NO: 3012)
[0031] 17 nucleotide guide sequence 3: UCCGUCAGGUUAAACUC (SEQ ID NO: 3013)
[0032] 17 nucleotide guide sequence 4: AUCCGUCAGGUUAAACU (SEQ ID NO: 3014)

[0033] In embodiments of the present invention, the guide sequence portion may be greater than 20 nucleotides in length. For example, in embodiments of the present invention the guide sequence portion may be 21, 22, 23, or 24 nucleotides in length. In such embodiments the guide sequence portion comprises 20 nucleotides in the sequence of 20 contiguous nucleotides set forth in any one of SEQ ID NOs: 1-3010 and additional nucleotides fully complimentary to a nucleotide or sequence of nucleotides adjacent to the 3′ end of the target sequence, 5′ end of the target sequence, or both.

[0034] In embodiments of the present invention a CRISPR nuclease and an RNA molecule comprising a guide sequence portion form a CRISPR complex that binds to a target DNA sequence to effect cleavage of the target DNA sequence. CRISPR nucleases, e.g. Cpfl, may form a CRISPR complex comprising a CRISPR nuclease and RNA molecule without a further tracrRNA molecule. Alternatively, CRISPR nucleases, e.g. Cas9, may form a CRISPR complex between the CRISPR nuclease, an RNA molecule, and a tracrRNA molecule.

[0035] In embodiments of the present invention, the RNA molecule may further comprise the sequence of a tracrRNA molecule. Such embodiments may be designed as a synthetic fusion of the guide portion of the RNA molecule and the trans-activating crRNA (tracrRNA). (See Jinek (2012) Science). Embodiments of the present invention may also form CRISPR complexes utilizing a separate tracrRNA molecule and a separate RNA molecule comprising a guide sequence portion. In such embodiments the tracrRNA molecule may hybridize with the RNA molecule via basepairing and may be advantageous in certain applications of the invention described herein.

[0036] The term “tracr mate sequence” refers to a sequence sufficiently complementary to a tracrRNA molecule so as to hybridize to the tracrRNA via basepairing and promote the formation of a CRISPR complex. (See e.g., US8906616). In embodiments of the present invention, the RNA molecule may further comprise a portion having a tracr mate sequence.

[0037] A “gene,” for the purposes of the present disclosure, includes a DNA region encoding a gene product, as well as all DNA regions which regulate the production of the gene product, whether or not such regulatory sequences are adjacent to coding and/or transcribed sequences. Accordingly, a gene includes, but is not necessarily limited to, promoter sequences, terminators, translational regulatory sequences such as ribosome binding sites and internal ribosome entry sites, enhancers, silencers, insulators, boundary elements, replication origins, matrix attachment sites and locus control regions.

[0038] “Eukaryotic” cells include, but are not limited to, fungal cells (such as yeast), plant cells, animal cells, mammalian cells and human cells.

[0039] The term “nuclease” as used herein refers to an enzyme capable of cleaving the phosphodiester bonds between the nucleotide subunits of nucleic acid. A nuclease may be isolated or derived from a natural source. The natural source may be any living organism. Alternatively, a nuclease may be a modified or a synthetic protein which retains the phosphodiester bond cleaving activity. Gene modification can be achieved using a nuclease, for example a CRISPR nuclease.

### Embodiments

[0040] The present disclosure provides a method for utilizing at least one naturally occurring nucleotide difference or polymorphism (e.g., single nucleotide polymorphism (SNP)) for distinguishing/discriminating between two alleles of a gene, one allele bearing a mutation such that it encodes a mutated protein causing a disease phenotype (“mutated allele”), and the other allele encoding for a functional protein (“functional allele”). The method further comprises the step of knocking out expression of the mutated protein and allowing expression of the functional protein. In some embodiments, the method is for treating, ameliorating, or preventing a dominant negative genetic disorder.

[0041] According to embodiments of the present invention, there is provided a first RNA molecule comprising a guide sequence portion having 17-20 nucleotides in the sequence of 17-20 contiguous nucleotides set forth in any one of SEQ ID NOs: 1-3010.

[0042] According to embodiments of the present invention, there is provided a first RNA molecule comprising a guide sequence portion having 17-20 contiguous nucleotides set forth in any one of SEQ ID NOs: 1-3010.

[0043] According embodiments of the present invention, an RNA molecule may further comprise a portion having a sequence which binds to a CRISPR nuclease.

[0044] According to embodiments of the present invention, the sequence which binds to a CRISPR nuclease is a tracrRNA sequence.

[0045] According to embodiments of the present invention, an RNA molecule may further comprise a portion having a tracr mate sequence.

[0046] According to embodiments of the present invention, an RNA molecule may further comprise one or more linker portions.

[0047] According to embodiments of the present invention, an RNA molecule may be up to 300, 290, 280, 270, 260, 250, 240, 230, 220, 210, 200, 190, 180, 170, 160, 150, 140, 130, 120, 110, or 100 nucleotides in length. Each possibility represents a separate embodiment. In embodiments of the present invention, the RNA molecule may be 17 up to 300 nucleotides in length, 100 up to 300 nucleotides in length, 150 up to 300 nucleotides in length, 200 up to 300 nucleotides in length, 100 to 200 nucleotides in length, or 150 up to 250 nucleotides in length. Each possibility represents a separate embodiment.

[0048] According to some embodiments of the present invention, there is provided a composition comprising an RNA molecule comprising a guide sequence portion having 17-20 nucleotides in the sequence of 17-20 contiguous nucleotides set forth in any one of SEQ ID NOs: 1-3010 and a CRISPR nuclease.

[0049] According to embodiments of the present invention, the composition may comprise a second RNA molecule comprising a guide sequence portion.

[0050] According to embodiments of the present invention, the guide sequence portion of the second RNA molecule comprises 17-20 nucleotides in the sequence of 17-20 contiguous nucleotides set forth in any one of SEQ ID NOs: 1-3010.

[0051] According to embodiments of the present invention, the 17-20 nucleotides of the guide sequence portion of the second RNA molecule are in a different sequence from the sequence of the guide sequence portion of the first RNA molecule

[0052] Embodiments of the present invention may comprise a tracrRNA molecule.

[0053] According to some embodiments of the present invention, there is provided a method for inactivating a mutant BEST1 allele in a cell, the method comprising delivering to the cell a composition comprising an RNA molecule comprising a guide sequence portion having 17-20 nucleotides in the sequence of 17-20 contiguous nucleotides set forth in any one of SEQ ID NOs: 1-3010 and a CRISPR nuclease.

[0054] According to some embodiments of the present invention, there is provided a method for treating Best Vitelliform Macular Dystrophy, the method comprising delivering to a subject having Best Vitelliform Macular Dystrophy a composition comprising an RNA molecule comprising a guide sequence portion having 17-20 nucleotides in the sequence of 17-20 contiguous nucleotides set forth in any one of SEQ ID NOs: 1-3010 and a CRISPR nuclease.

[0055] According to embodiments of the present invention, the composition comprises a second RNA molecule comprising a guide sequence portion having 17-20 nucleotides in the sequence of 17-20 contiguous nucleotides set forth in any one of SEQ ID NOs: 1-3010.

[0056] According to embodiments of the present invention, the 17-20 nucleotides of the guide sequence portion of the second RNA molecule are in a different sequence from the sequence of the guide sequence portion of the first RNA molecule

[0057] According to embodiments of the present invention, the CRISPR nuclease and the RNA molecule or RNA molecules are delivered to the subject and/or cells substantially at the same time or at different times.

[0058] According to embodiments of the present invention, the tracrRNA is delivered to the subject and/or cells substantially at the same time or at different times as the CRISPR nuclease and RNA molecule or RNA molecules.

[0059] According to embodiments of the present invention, the first RNA molecule targets a SNP or disease-causing mutation in an exon or promoter of a mutated allele, and wherein the second RNA molecule targets a SNP in the same or a different exon of the mutated allele, a SNP in an intron, or a sequence in an intron present in both the mutated or functional allele.

[0060] According to embodiments of the present invention, the first RNA molecule or the first and the second RNA molecules target a SNP in the promoter region, the start codon, or the untranslated region (UTR) of a mutated allele.

[0061] According to embodiments of the present invention, the first RNA molecule or the first and the second RNA molecules targets at least a portion of the promoter and/or the start codon and/or a portion of the UTR of a mutated allele.

[0062] According to embodiments of the present invention, the first RNA molecule targets a portion of the promoter, a first SNP in the promoter, or a SNP upstream to the promoter of a mutated allele and the second RNA molecule is targets a second SNP, which is downstream of the first SNP, and is in the promoter, in the UTR, or in an intron or in an exon of a mutated allele.

[0063] According to embodiments of the present invention, the first RNA molecule targets a SNP in the promoter, upstream of the promoter, or the UTR of a mutated allele and the second RNA molecule is designed to target a sequence which is present in an intron of both the mutated allele and the functional allele.

[0064] According to embodiments of the present invention, the first RNA molecule targets a sequence upstream of the promotor which is present in both a mutated and functional allele and the second RNA molecule targets a SNP or disease-causing mutation in any location of the gene.

[0065] According to embodiments of the present invention, there is provided a method comprising removing an exon containing a disease-causing mutation from a mutated allele, wherein the first RNA molecule or the first and the second RNA molecules target regions flanking an entire exon or a portion of the exon.

[0066] According to embodiments of the present invention, there is provided a method comprising removing multiple exons, the entire open reading frame of a gene, or removing the entire gene.

[0067] According to embodiments of the present invention, the first RNA molecule targets a SNP or disease-causing mutation in an exon or promoter of a mutated allele, and wherein the second RNA molecule targets a SNP in the same or a different exon of the mutated allele, a SNP in an intron, or a sequence in an intron present in both the mutated or functional allele.

[0068] According to embodiments of the present invention, the first RNA molecule or the first and the second RNA molecules target an alternative splicing signal sequence between an exon and an intron of a mutant allele.

[0069] According to embodiments of the present invention, the second RNA molecule targets a sequence present in both a mutated allele and a functional allele.

[0070] According to embodiments of the present invention, the second RNA molecule targets an intron.

[0071] According to embodiments of the present invention, there is provided a method comprising subjecting the mutant allele to insertion or deletion by an error prone non-homologous end joining (NHEJ) mechanism, generating a frameshift in the mutated allele’s sequence.

[0072] According to embodiments of the present invention, the frameshift results in inactivation or knockout of the mutated allele.

[0073] According to embodiments of the present invention, the frameshift creates an early stop codon in the mutated allele.

[0074] According to embodiments of the present invention, the frameshift results in nonsense-mediated mRNA decay of the transcript of the mutant allele.

[0075] According to embodiments of the present invention, the inactivating or treating results in a truncated protein encoded by the mutated allele and a functional protein encoded by the functional allele.

[0076] According to some embodiments of the present invention, there is provided use of a composition comprising an RNA molecule comprising a guide sequence portion having 17-20 nucleotides in the sequence of 17-20 contiguous nucleotides set forth in any one of SEQ ID NOs: 1-3010 and a CRISPR nuclease inactivating a mutant BEST1 allele in a cell, comprising delivering to the cell the RNA molecule comprising a guide sequence portion having 17-20 nucleotides in the sequence of 17-20 contiguous nucleotides set forth in any one of SEQ ID NOs: 1-3010 and the CRISPR nuclease.

[0077] According to embodiments of the present invention, there is provided a medicament comprising an RNA molecule comprising a guide sequence portion having 17-20 nucleotides in the sequence of 17-20 contiguous nucleotides set forth in any one of SEQ ID NOs: 1-3010 and a CRISPR nuclease for use in inactivating a mutant BEST1 allele in a cell, wherein the medicament is administered by delivering to the cell the composition comprising an RNA molecule comprising a guide sequence portion having 17-20 nucleotides in the sequence of 17-20 contiguous nucleotides set forth in any one of SEQ ID NOs: 1-3010 and a CRISPR nuclease.

[0078] According to some embodiments of the present invention, there is provided use of a composition comprising an RNA molecule comprising a guide sequence portion having 17-20 nucleotides in the sequence of 17-20 contiguous nucleotides set forth in any one of SEQ ID NOs: 1-3010 and a CRISPR nuclease for treating ameliorating or preventing Best Vitelliform Macular Dystrophy, comprising delivering to a subject having or at risk of having Best Vitelliform Macular Dystrophy the composition of comprising an RNA molecule comprising a guide sequence portion having 17-20 nucleotides in the sequence of 17-20 contiguous nucleotides set forth in any one of SEQ ID NOs: 1-3010 and a CRISPR nuclease.

[0079] According to some embodiments of the present invention, there is provided a medicament comprising the composition comprising an RNA molecule comprising a guide sequence portion having 17-20 nucleotides in the sequence of 17-20 contiguous nucleotides set forth in any one of SEQ ID NOs: 1-3010 and a CRISPR nuclease for use in treating ameliorating or preventing Best Vitelliform Macular Dystrophy, wherein the medicament is administered by delivering to a subject having or at risk of having Best Vitelliform Macular Dystrophy: the composition comprising an RNA molecule comprising a guide sequence portion having 17-20 nucleotides in the sequence of 17-20 contiguous nucleotides set forth in any one of SEQ ID NOs: 1-3010 and a CRISPR nuclease.

[0080] According to some embodiments of the present invention, there is provided a kit for inactivating a mutant BEST1 allele in a cell, comprising an RNA molecule comprising a guide sequence portion having 17-20 nucleotides in the sequence of 17-20 contiguous nucleotides set forth in any one of SEQ ID NOs: 1-3010, a CRISPR nuclease, and/or a tracrRNA molecule; and instructions for delivering the RNA molecule; CRISPR nuclease, and/or the tracrRNA to the cell.

[0081] According to some embodiments of the present invention, there is provided a kit for treating Best Vitelliform Macular Dystrophy in a subject, comprising an RNA molecule comprising a guide sequence portion having 17-20 nucleotides in the sequence of 17-20 contiguous nucleotides set forth in any one of SEQ ID NOs: 1-3010, a CRISPR nuclease, and/or a tracrRNA molecule; and instructions for delivering the RNA molecule; CRISPR nuclease, and/or the tracrRNA to a subject having or at risk of having Best Vitelliform Macular Dystrophy.

[0082] In embodiments of the present invention, the RNA molecule comprises a guide sequence portion having 17-20 nucleotides in the sequence of 17-20 contiguous nucleotides set forth in any one of SEQ ID NOs: 1-714, SEQ ID NOs: 715-3010, or SEQ ID NOs 1-3010.

[0083] The compositions and methods of the present disclosure may be utilized for treating, preventing, ameliorating, or slowing progression of Best Vitelliform Macular Dystrophy.

[0084] In some embodiments, a mutated allele is deactivated by delivering to a cell an RNA molecule which targets a SNP in the promoter region, the start codon, or the untranslated region (UTR) of the mutated allele.

[0085] In some embodiments, a mutated allele is inactivated by removing at least a portion of the promoter and/or removing the start codon and/or a portion of the UTR. In some embodiments, the method of deactivating a mutated allele comprises removing at least a portion of the promoter. In such embodiments one RNA molecule may be designed for targeting a first SNP in the promoter or upstream to the promoter and another RNA molecule is designed to target a second SNP, which is downstream of the first SNP, and is in the promoter, in the UTR, or in an intron or in an exon. Alternatively, one RNA molecule may be designed for targeting a SNP in the promoter, or upstream of the promoter, or the UTR and another RNA molecule is designed to target a sequence which is present in an intron of both the mutated allele and the functional allele. Alternatively, one RNA molecule may be designed for targeting a sequence upstream of the promotor which is present in both the mutated and functional allele and the other guide is designed to target a SNP or disease-causing mutation in any location of the gene e.g., in an exon, intron, UTR, or downstream of the promoter.

[0086] In some embodiments, the method of deactivating a mutated allele comprises an exon skipping step comprising removing an exon containing a disease-causing mutation from the mutated allele. Removing an exon containing a disease-causing mutation in the mutated allele requires two RNA molecules which target regions flanking the entire exon or a portion of the exon. Removal of an exon containing the disease-causing mutation may be designed to eliminate the disease-causing action of the protein while allowing for expression of the remaining protein product which retains some or all of the wild-type activity. As an alternative to single exon skipping, multiple exons, the entire open reading frame or the entire gene can be excised using two RNA molecules flanking the region desired to be excised.

[0087] In some embodiments, the method of deactivating a mutated allele comprises delivering two RNA molecules to a cell, wherein one RNA molecule targets a SNP or disease-causing mutation in an exon or promoter of the mutated allele, and wherein the other RNA molecule targets a SNP in the same or a different exon of the mutated allele, a SNP in an intron, or a sequence in an intron present in both the mutated or functional allele.

[0088] In some embodiments, an RNA molecule is used to target a CRISPR nuclease to an alternative splicing signal sequence between an exon and an intron of a mutant allele, thereby destroying the alternative splicing signal sequence in the mutant allele.

[0089] Any one of, or combination of, the above-mentioned strategies for deactivating a mutant allele may be used in the context of the invention.

[0090] Additional strategies may be used to deactivate a mutated allele. For example, in embodiments of the present invention, an RNA molecule is used to direct a CRISPR nuclease to an exon or a splice site of a mutated allele in order to create a double-stranded break (DSB), leading to insertion or deletion of nucleotides by an error-prone non-homologous end-joining (NHEJ) mechanism and formation of a frameshift mutation in the mutated allele. The frameshift mutation may result in: (1) inactivation or knockout of the mutated allele by generation of an early stop codon in the mutated allele, resulting in generation of a truncated protein; or (2) nonsense mediated mRNA decay of the transcript of the mutant allele. In further embodiments, one RNA molecule is used to direct a CRISPR nuclease to a promotor of a mutated allele.

[0091] In some embodiments, the method of deactivating a mutated allele further comprises enhancing activity of the functional protein such as by providing a protein/peptide, a nucleic acid encoding a protein/peptide, or a small molecule such as a chemical compound, capable of activating/enhancing activity of the functional protein.

[0092] According to some embodiments, the present disclosure provides an RNA sequence (‘RNA molecule’) which binds to / associates with and/or directs the RNA guided DNA nuclease e.g., CRISPR nuclease to a sequence comprising at least one nucleotide which differs between a mutated allele and a functional allele (e.g., SNP) of a gene of interest (i.e., a sequence of the mutated allele which is not present in the functional allele).

[0093] In some embodiments, the method comprises the steps of: contacting a mutated allele of a gene of interest with an allele-specific RNA molecule and a CRISPR nuclease e.g., a Cas9 protein, wherein the allele-specific RNA molecule and the CRISPR nuclease e.g., Cas9 associate with a nucleotide sequence of the mutated allele of the gene of interest which differs by at least one nucleotide from a nucleotide sequence of a functional allele of the gene of interest, thereby modifying or knocking-out the mutated allele.

[0094] In some embodiments, the allele-specific RNA molecule and a CRISPR nuclease is introduced to a cell encoding the gene of interest. In some embodiments, the cell encoding the gene of interest is in a mammalian subject. In some embodiments, the cell encoding the gene of interest is in a plant.

[0095] In some embodiments, the cleaved mutated allele is further subjected to insertion or deletion (indel) by an error prone non-homologous end joining (NHEJ) mechanism, generating a frameshift in the mutated allele’s sequence. In some embodiments, the generated frameshift results in inactivation or knockout of the mutated allele. In some embodiments, the generated frameshift creates an early stop codon in the mutated allele and results in generation of a truncated protein. In such embodiments, the method results in the generation of a truncated protein encoded by the mutated allele and a functional protein encoded by the functional allele. In some embodiments, a frameshift generated in a mutated allele using the methods of the invention results in nonsense-mediated mRNA decay of the transcript of the mutant allele.

[0096] In some embodiments, the mutated allele is an allele of the BEST1 gene. In some embodiments, the RNA molecule targets a SNP which co-exists with / is genetically linked to the mutated sequence associated with Best Vitelliform Macular Dystrophy genetic disorder. In some embodiments, the RNA molecule targets a SNP which is highly prevalent in the population and exists in the mutated allele having the mutated sequence associated with Best Vitelliform Macular Dystrophy genetic disorder and not in the functional allele of an individual subject to be treated. In some embodiments, a disease-causing mutation within a mutated BEST1 allele is targeted.

[0097] In some embodiments, the SNP is within an exon of the gene of interest. In such embodiments, a guide sequence portion of an RNA molecule may be designed to associate with a sequence of the exon of the gene of interest.

[0098] In some embodiments, SNP is within an intron or an exon of the gene of interest. In some embodiments, SNP is in close proximity to a splice site between the intron and the exon. In some embodiments, the close proximity to a splice site is 1, 2, 3, 4, 5, 6, 7, 8, 9, 10, 11, 12, 13, 14, 15, 16, 17, 18, 19, or 20 nucleotides upstream or downstream to the splice site. Each possibility represents a separate embodiment of the present invention. In such embodiments, a guide sequence portion of an RNA molecule may be designed to associate with a sequence of the gene of interest which comprises the splice site.

[0099] In some embodiments, the method is utilized for treating a subject having a disease phenotype resulting from the heterozygote BEST1 gene. In such embodiments, the method results in improvement, amelioration or prevention of the disease phenotype.

[0100] Embodiments referred to above refer to a CRISPR nuclease, RNA molecule(s), and tracrRNA being effective in a subject or cells at the same time. The CRISPR, RNA molecule(s), and tracrRNA can be delivered substantially at the same time or can be delivered at different times but have effect at the same time. For example, this includes delivering the CRISPR nuclease to the subject or cells before the RNA molecule and/or tracr RNA is substantially extant in the subject or cells.

[0101] In some embodiments, the cell is a retinal cell. In some embodiments, the cell is a Retinal pigment epithelium (RPE) cell.

### Dominant Genetic Disorders

[0102] One of skill in the art will appreciate that all subjects with any type of heterozygote genetic disorder (e.g., dominant genetic disorder) may be subjected to the methods described herein. In one embodiment, the present invention may be used to target a gene involved in, associated with, or causative of dominant genetic disorders such as, for example treating Best Vitelliform Macular Dystrophy. In some embodiments, the dominant genetic disorder is treating Best Vitelliform Macular Dystrophy. In some embodiments, the target gene is the BEST1 gene (Entrez Gene, gene ID No: 7439).

### CRISPR Nucleases and PAM Recognition

[0103] In some embodiments, the sequence specific nuclease is selected from CRISPR nucleases, or a functional variant thereof. In some embodiments, the sequence specific nuclease is an RNA guided DNA nuclease. In such embodiments, the RNA sequence which guides the RNA guided DNA nuclease (e.g., Cpfl) binds to and/or directs the RNA guided DNA nuclease to the sequence comprising at least one nucleotide which differs between a mutated allele and its counterpart functional allele (e.g., SNP). In some embodiments, the CRISPR complex does not further comprise a tracrRNA. In a non-limiting example, in which the RNA guided DNA nuclease is a CRISPR protein, the at least one nucleotide which differs between the dominant mutated allele and the functional allele may be within the PAM site and/or proximal to the PAM site within the region that the RNA molecule is designed to hybridize to. A skilled artisan will appreciate that RNA molecules can be engineered to bind to a target of choice in a genome by commonly known methods in the art.

[0104] In embodiments of the present invention, a type II CRISPR system utilizes a mature crRNA:tracrRNA complex directs a CRISPR nuclease, e.g. Cas9, to the target DNA via Watson-Crick base-pairing between the crRNA and the protospacer on the target DNA next to the protospacer adjacent motif (PAM), an additional requirement for target recognition. The CRISPR nuclease then mediates cleavage of target DNA to create a double-stranded break within the protospacer. A skilled artisan will appreciate that each of the engineered RNA molecule of the present invention is further designed such as to associate with a target genomic DNA sequence of interest next to a protospacer adjacent motif (PAM), e.g., a PAM matching the sequence relevant for the type of CRISPR nuclease utilized, such as for a non-limiting example, NGG or NAG, wherein “N” is any nucleobase, for Streptococcus pyogenes Cas9 WT (SpCAS9); NNGRRT for Staphylococcus aureus (SaCas9); NNNVRYM for Jejuni Cas9 WT; NGAN or NGNG for SpCas9-VQR variant; NGCG for SpCas9-VRER variant; NGAG for SpCas9-EQR variant; NNNNGATT for Neisseria meningitidis (NmCas9); or TTTV for Cpfl. RNA molecules of the present invention are each designed to form complexes in conjunction with one or more different CRISPR nucleases and designed to target polynucleotide sequences of interest utilizing one or more different PAM sequences respective to the CRISPR nuclease utilized.

[0105] In some embodiments, an RNA-guided DNA nuclease e.g., a CRISPR nuclease, may be used to cause a DNA break at a desired location in the genome of a cell. The most commonly used RNA-guided DNA nucleases are derived from CRISPR systems, however, other RNA-guided DNA nucleases are also contemplated for use in the genome editing compositions and methods described herein. For instance, see U.S. Pat. Publication No. 2015-0211023, incorporated herein by reference.

[0106] CRISPR systems that may be used in the practice of the invention vary greatly. CRISPR systems can be a type I, a type II, or a type III system. Non- limiting examples of suitable CRISPR proteins include Cas3, Cas4, Cas5, Cas5e (or CasD), Cas6, Cas6e, Cas6f, Cas7, Cas8al, Cas8a2, Cas8b, Cas8c, Cas9, Casl0, Casl Od, CasF, CasG, CasH, Csyl , Csy2, Csy3, Csel (or CasA), Cse2 (or CasB), Cse3 (or CasE), Cse4 (or CasC), Cscl, Csc2, Csa5, Csn2, Csm2, Csm3, Csm4, Csm5, Csm6, Cmrl, Cmr3, Cmr4, Cmr5, Cmr6, Csbl , Csb2, Csb3,Csxl7, Csxl4, Csxl0, Csxl6, CsaX, Csx3, Cszl, Csxl5, Csfl, Csf2, Csf3, Csf4, and Cul966.

[0107] In some embodiments, the RNA-guided DNA nuclease is a CRISPR nuclease derived from a type II CRISPR system (e.g., Cas9). The CRISPR nuclease may be derived from Streptococcus pyogenes, Streptococcus thermophilus, Streptococcus sp., Staphylococcus aureus, Neisseria meningitidis, Treponema denticola, Nocardiopsis dassonvillei, Streptomyces pristinaespiralis, Streptomyces viridochromogenes, Streptomyces viridochromogenes, Streptosporangium roseum, Streptosporangium roseum, Alicyclobacillus acidocaldarius, Bacillus pseudomycoides, Bacillus selenitireducens, Exiguobacterium sibiricum, Lactobacillus delbrueckii, Lactobacillus salivarius, Microscilla marina, Burkholderiales bacterium, Polaromonas naphthalenivorans, Polaromonas sp., Crocosphaera watsonii, Cyanothece sp., Microcystis aeruginosa, Synechococcus sp., Acetohalobium arabaticum, Ammonifex degensii, Caldicelulosiruptor becscii, Candidatus Desulforudis, Clostridium botulinum, Clostridium difficile, Finegoldia magna, Natranaerobius thermophilus, Pelotomaculumthermopropionicum, Acidithiobacillus caldus, Acidithiobacillus ferrooxidans, Allochromatium vinosum, Marinobacter sp., Nitrosococcus halophilus, Nitrosococcus watsoni, Pseudoalteromonas haloplanktis, Ktedonobacter racemifer, Methanohalobium evestigatum, Anabaena variabilis, Nodularia spumigena, Nostoc sp., Arthrospira maxima, Arthrospira platensis, Arthrospira sp., Lyngbya sp., Microcoleus chthonoplastes, Oscillatoria sp., Petrotoga mobilis, Thermosipho africanus, Acaryochloris marina, or any species which encodes a CRISPR nuclease with a known PAM sequence. CRISPR nucleases encoded by uncultured bacteria may also be used in the context of the invention. (See Burstein et al. Nature, 2017). Variants of CRIPSR proteins having known PAM sequences e.g., spCas9 D1135E variant, spCas9 VQR variant, spCas9 EQR variant, or spCas9 VRER variant may also be used in the context of the invention.

[0108] Thus, an RNA guided DNA nuclease of a CRISPR system, such as a Cas9 protein or modified Cas9 or homolog or ortholog of Cas9, or other RNA guided DNA nucleases belonging to other types of CRISPR systems, such as Cpfl and its homologs and orthologs, may be used in the compositions of the present invention.

[0109] In certain embodiments, the CRIPSR nuclease may be a “functional derivative” of a naturally occurring Cas protein. A “functional derivative” of a native sequence polypeptide is a compound having a qualitative biological property in common with a native sequence polypeptide. “Functional derivatives” include, but are not limited to, fragments of a native sequence and derivatives of a native sequence polypeptide and its fragments, provided that they have a biological activity in common with a corresponding native sequence polypeptide. A biological activity contemplated herein is the ability of the functional derivative to hydrolyze a DNA substrate into fragments. The term “derivative” encompasses both amino acid sequence variants of polypeptide, covalent modifications, and fusions thereof. Suitable derivatives of a Cas polypeptide or a fragment thereof include but are not limited to mutants, fusions, covalent modifications of Cas protein or a fragment thereof. Cas protein, which includes Cas protein or a fragment thereof, as well as derivatives of Cas protein or a fragment thereof, may be obtainable from a cell or synthesized chemically or by a combination of these two procedures. The cell may be a cell that naturally produces Cas protein, or a cell that naturally produces Cas protein and is genetically engineered to produce the endogenous Cas protein at a higher expression level or to produce a Cas protein from an exogenously introduced nucleic acid, which nucleic acid encodes a Cas that is same or different from the endogenous Cas. In some cases, the cell does not naturally produce Cas protein and is genetically engineered to produce a Cas protein.

[0110] In some embodiments, the CRISPR nuclease is Cpfl. Cpfl is a single RNA-guided endonuclease which utilizes a T-rich protospacer-adjacent motif. Cpfl cleaves DNA via a staggered DNA double-stranded break. Two Cpfl enzymes from Acidaminococcus and Lachnospiraceae have been shown to carry out efficient genome-editing activity in human cells. (See Zetsche et al. (2015) Cell.).

[0111] Thus, an RNA guided DNA nuclease of a Type II CRISPR System, such as a Cas9 protein or modified Cas9 or homologs, orthologues, or variants of Cas9, or other RNA guided DNA nucleases belonging to other types of CRISPR systems, such as Cpfl and its homologs, orthologues, or variants, may be used in the present invention.

[0112] In some embodiments, the guide molecule comprises one or more chemical modifications which imparts a new or improved property (e.g., improved stability from degradation, improved hybridization energetics, or improved binding properties with an RNA guided DNA nuclease). Suitable chemical modifications include, but are not limited to: modified bases, modified sugar moieties, or modified inter-nucleoside linkages. Non-limiting examples of suitable chemical modifications include: 4-acetylcytidine, 5-(carboxyhydroxymethyl)uridine, 2′-O-methylcytidine, 5-carboxymethylaminomethyl-2-thiouridine, 5-carboxymethylaminomethyluridine, dihydrouridine, 2′-O-methylpseudouridine, “beta, D-galactosylqueuosine”, 2′-O-methylguanosine, inosine, N6-isopentenyladenosine, 1-methyladenosine, 1-methylpseudouridine, 1-methylguanosine, 1-methylinosine, “2,2-dimethylguanosine”, 2-methyladenosine, 2-methylguanosine, 3-methylcytidine, 5-methylcytidine, N6-methyladenosine, 7-methylguanosine, 5-methylaminomethyluridine, 5-methoxyaminomethyl-2-thiouridine, “beta, D-mannosylqueuosine”, 5-methoxycarbonylmethyl-2-thiouridine, 5-methoxycarbonylmethyluridine, 5-methoxyuridine, 2-methylthio-N6-isopentenyladenosine, N-((9-beta-D-ribofuranosyl-2-methylthiopurine-6-yl)carbamoyl)threonine, N-((9-beta-D-ribofuranosylpurine-6-yl)N-methylcarbamoyl)threonine, uridine-5-oxyacetic acid-methylester, uridine-5-oxyacetic acid, wybutoxosine, queuosine, 2-thiocytidine, 5-methyl-2-thiouridine, 2-thiouridine, 4-thiouridine, 5-methyluridine, N-((9-beta-D-ribofuranosylpurine-6-yl)-carbamoyl)threonine, 2′-O-methyl-5-methyluridine, 2′-O-methyluridine, wybutosine, “3-(3-amino-3-carboxy-propyl)uridine, (acp3)u”, 2′-0-methyl (M), 3′-phosphorothioate (MS), 3′-thioPACE (MSP), pseudouridine, or 1-methyl pseudo-uridine. Each possibility represents a separate embodiment of the present invention.

### Guide Sequences Which Specifically Target a Mutant Allele

[0113] A given gene may contain thousands of SNPs. Utilizing a 24 base pair target window for targeting each SNP in a gene would require hundreds of thousands of guide sequences. Any given guide sequence when utilized to target a SNP may result in degradation of the guide sequence, limited activity, no activity, or off-target effects. Accordingly, suitable guide sequences are necessary for targeting a given gene. By the present invention, a novel set of guide sequences have been identified for knocking out expression of a mutated BEST1 protein, inactivating a mutant BEST1 gene allele, and treating Best Vitelliform Macular Dystrophy.

[0114] The present disclosure provides guide sequences capable of specifically targeting a mutated allele for inactivation while leaving the functional allele unmodified. The guide sequences of the present invention are designed to, and are most likely to, specifically differentiate between a mutated allele and a functional allele. Of all possible guide sequences which target a mutated allele desired to be inactivated, the specific guide sequences disclosed herein are specifically effective to function with the disclosed embodiments.

[0115] Briefly, the guide sequences may have properties as follows: (1) target SNP/insertion/deletion/indel with a high prevalence in the general population, in a specific ethnic population or in a patient population is above 1% and the SNP/insertion/deletion/indel heterozygosity rate in the same population is above 1%; (2) target a location of a SNP/insertion/deletion/indel proximal to a portion of the gene e.g., within 5k bases of any portion of the gene, for example, a promoter, a UTR, an exon or an intron; and (3) target a mutant allele using an RNA molecule which targets a founder or common pathogenic mutations for the disease/gene. In some embodiments, the prevalence of the SNP/insertion/deletion/indel in the general population, in a specific ethnic population or in a patient population is above 1%, 2%, 3%, 4%, 5%, 6%, 7%, 8%, 9%, 10%, 11%, 12%, 13%, 14%, or 15% and the SNP/insertion/deletion/indel heterozygosity rate in the same population is above 1%, 2%, 3%, 4%, 5%, 6%, 7%, 8%, 9%, 10%, 11%, 12%, 13%, 14%, or 15%. Each possibility represents a separate embodiment and may be combined at will.

[0116] For each gene, according to SNP/insertion/deletion/indel any one of the following strategies may be used to deactivate the mutated allele: (1) Knockout strategy using one RNA molecule - one RNA molecule is utilized to direct a CRISPR nuclease to a mutated allele and create a double-strand break (DSB) leading to formation of a frameshift mutation in an exon or in a splice site region of the mutated allele; (2) Knockout strategy using two RNA molecules - two RNA molecules are utilized. A first RNA molecule targets a region in the promoter or an upstream region of a mutated allele and another RNA molecule targets downstream of the first RNA molecule in a promoter, exon, or intron of the mutated allele; (3) Exon(s) skipping strategy - one RNA molecule may be used to target a CRISPR nuclease to a splice site region, either at the 5′ end of an intron (donor sequence) or the 3′ end of an intron (acceptor sequence), in order to destroy the splice site. Alternatively, two RNA molecules may be utilized such that a first RNA molecule targets an upstream region of an exon and a second RNA molecule targets a region downstream of the first RNA molecule, thereby excising the exon(s). Based on the locations of identified SNPs/insertions/deletions/indels for each mutant allele, any one of, or a combination of, the above-mentioned methods to deactivate the mutant allele may be utilized.

[0117] When only one RNA molecule is used is that the location of the SNP is in an exon or in close proximity (e.g., within 20 basepairs) to a splice site between the intron and the exon. When two RNA molecules are used, guide sequences may target two SNPs such that the first SNP is upstream of exon 1 e.g., within the 5′ untranslated region, or within the promoter or within the first 2 kilobases 5′ of the transcription start site, and the second SNP is downstream of the first SNP e.g., within the first 2 kilobases 5′ of the transcription start site, or within intron 1, 2 or 3, or within exon 1, exon 2, or exon 3.

[0118] Guide sequences of the present invention may target a SNP in the upstream portion of the targeted gene, preferably upstream of the last exon of the targeted gene. Guide sequences may target a SNP upstream to exon 1, for example within the 5′ untranslated region, or within the promoter or within the first 4-5 kilobases 5′ of the transcription start site.

[0119] Guide sequences of the present invention may also target a SNP within close proximity (e.g., within 50 basepairs, more preferably with 20 basepairs) to a known protospacer adjacent motif (PAM) site.

[0120] Guide sequences of the present invention also may target: (1) a heterozygous SNP for the targeted gene; (2) a heterozygous SNPs upstream and downstream of the gene; (3) a SNPs with a prevalence of the SNP/insertion/deletion/indel in the general population, in a specific ethnic population, or in a patient population above 1%; (4) have a guanine-cytosine content of greater than 30% and less than 85%; (5) have no repeat of 4 or more thymine/uracil or 8 or more guanine, cytosine, or adenine; (6) having no off-target identified by off-target analysis; and (7) preferably target Exons over Introns or be upstream of a SNP rather than downstream of a SNP.

[0121] In embodiments of the present invention, the SNP may be upstream or downstream of the gene. In embodiments of the present invention, the SNP is within 4,000 base pairs upstream or downstream of the gene.

[0122] The at least one nucleotide which differs between the mutated allele and the functional allele, may be upstream, downstream or within the sequence of the disease-causing mutation of the gene of interest. The at least one nucleotide which differs between the mutated allele and the functional allele, may be within an exon or within an intron of the gene of interest. In some embodiments, the at least one nucleotide which differs between the mutated allele and the functional allele is within an exon of the gene of interest. In some embodiments, the at least one nucleotide which differs between the mutated allele and the functional allele is within an intron or an exon of the gene of interest, in close proximity to a splice site between the intron and the exon e.g., 1, 2, 3, 4, 5, 6, 7, 8, 9, 10, 11, 12, 13, 14, 15, 16, 17, 18, 19, or 20 nucleotides upstream or downstream to the splice site.

[0123] In some embodiments, the at least one nucleotide is a single nucleotide polymorphisms (SNPs). In some embodiments, each of the nucleotide variants of the SNP may be expressed in the mutated allele. In some embodiments, the SNP may be a founder or common pathogenic mutation.

[0124] Guide sequences may target a SNP which has both (1) a high prevalence in the general population e.g., above 1% in the population; and (2) a high heterozygosity rate in the population, e.g., above 1%. Guide sequences may target a SNP that is globally distributed. A SNP may be a founder or common pathogenic mutation. In some embodiments, the prevalence in the general population is above 1%, 2%, 3%, 4%, 5%, 6%, 7%, 8%, 9%, 10%, 11%, 12%, 13%, 14%, or 15%. Each possibility represents a separate embodiment. In some embodiments, the heterozygosity rate in the population is above 1%, 2%, 3%, 4%, 5%, 6%, 7%, 8%, 9%, 10%, 11%, 12%, 13%, 14%, or 15%. Each possibility represents a separate embodiment.

[0125] In some embodiments, the at least one nucleotide which differs between the mutated allele and the functional allele is linked to/co-exists with the disease-causing mutation in high prevalence in a population. In such embodiments, “high prevalence” refers to at least 92%, 93%, 94%, 95%, 96%, 97%, 98%, 99%, or 100%. Each possibility represents a separate embodiment of the present invention. In one embodiment, the at least one nucleotide which differs between the mutated allele and the functional allele, is a disease-associated mutation. In some embodiments, the SNP is highly prevalent in the population. In such embodiments, “highly prevalent” refers to at least 10%, 11%, 12%, 13%, 14%, 15%, 20%, 30%, 40%, 50%, 60%, or 70% of a population. Each possibility represents a separate embodiment of the present invention.

[0126] Guide sequences of the present invention may satisfy any one of the above criteria and are most likely to differentiate between a mutated allele from its corresponding functional allele.

[0127] In some embodiments the RNA molecule targets a SNP/WT sequence linked to SNPs as shown in Table 1 below. The SNP details are indicated in the 1^{st} column and include: SNP ID No. (based on NCBI’s 2018 database of Single Nucleotide Polymorphisms (dbSNP)). For variants with no available rs number variants characteristic are indicated based on gnomAD 2018 browser database. The 2^{nd} column indicates an assigned identifier for each SNP. The 3^{rd} column indicates the location of each SNP on the BEST1 gene.

TABLE 1

BEST1 gene SNPs

| | | |
|---|---|---|
| RSID | SNP No. | SNP location in the gene |
| rs1800009 | s1 | Exon_10 of 11 |
| rs2524294 | s2 | Intron_2 of 10 |
| rs909268 | s3 | Intron_4 of 10 |
| rs2668898 | s4 | Intron_6 of 10 |
| rs972355 | s5 | upstream -18bp |
| rs972353 | s6 | Exon_1 of 11 |
| rs2736597 | s7 | Intron_1 of 10 |
| rs1800007 | s8 | Exon_2 of 11 |
| rs760306 | s9 | Intron_4 of 10 |
| rs974121 | s10 | upstream -1048bp |
| rs168991 | s11 | Intron_2 of 10 |
| rs195161 | s12 | Intron_5 of 10 |
| rs149698 | s13 | Exon_10 of 11 |
| rs1534842 | s14 | upstream -3765bp |
| rs3758976 | s15 | upstream -250bp |
| rs1800008 | s16 | Exon_10 of 11 |
| rs195158 | s17 | Intron_7 of 10 |
| rs195157 | s18 | Intron_9 of 10 |
| rs195156 | s19 | Intron_9 of 10 |
| rs2009875 | s20 | upstream -3323bp |
| rs2955684 | s21 | Intron_6 of 10 |
| rs2955683 | s22 | Intron_6 of 10 |
| rs17185413 | s23 | Intron_10 of 10 |
| rs972354 | s24 | Exon_1 of 11 |
| rs195163 | s25 | Intron_4 of 10 |
| rs2668897 | s26 | Intron_10 of 10 |
| rs1109748 | s27 | Exon_3 of 11 |
| rs195160 | s28 | Intron_7 of 10 |
| rs183176 | s29 | Intron_2 of 10 |
| rs195167 | s30 | Intron_2 of 10 |
| rs195165 | s31 | Intron_3 of 10 |
| rs195164 | s32 | Intron_4 of 10 |
| rs2736594 | s33 | Intron_2 of 10 |
| rs195162 | s34 | Intron_5 of 10 |
| rs113492158 | s35 | Intron_6 of 10 |
| rs195166 | s36 | Intron_2 of 10 |
| rs741886 | s37 | Intron_5 of 10 |
| rs2736596 | s38 | Intron_1 of 10 |
| rs1801621 | s39 | Exon_11 of 11 |
| rs17156609 | s40 | downstream +42bp |
| rs1534843 | s41 | upstream -3860bp |
| rs73491300 | s42 | upstream -224bp |
| rs74754540 | s43 | upstream -998bp |
| rs112769638 | s44 | Intron_1 of 10 |
| rs74369809 | s62 | Intron_9 of 10 |
| rs78054615 | s63 | Intron_2 of 10 |
| rs144630276 | s64 | Intron_2 of 10 |
| rs141507235 | s65 | Intron_6 of 10 |
| rs114944671 | s66 | Intron_3 of 10 |
| rs1801327 | s67 | Exon_11 of 11 |
| rs78012644 | s68 | Intron_7 of 10 |
| rs112665957 | s69 | Intron_2 of 10 |
| rs139745332 | s70 | Intron_2 of 10 |
| rs77543508 | s71 | Intron_2 of 10 |
| rs78545127 | s72 | upstream -2638bp |
| rs116516743 | s73 | upstream -2116bp |
| rs1805140 | s74 | Exon_6 of 11 |
| rs73493205 | s75 | Intron_1 of 10 |
| rs77651946 | s76 | Intron_1 of 10 |
| rs195159 | s77 | Intron_7 of 10 |
| rs195155 | s78 | Intron_10 of 10 |
| rs2727272 | s79 | Intron_2 of 10 |
| rs2668899 | s80 | Intron_2 of 10 |
| rs2736595 | s81 | Intron_2 of 10 |
| rs56215258 | s82 | Intron_10 of 10 |
| rs174481 | s83 | upstream -960bp |
| rs168990 | s84 | Intron_4 of 10 |
| rs111509315 | s85 | Intron_9 of 10 |
| rs1735379 | s86 | Intron_7 of 10 |
| rs112720784 | s87 | Intron_2 of 10 |

### Delivery to Cells

[0128] The RNA molecule compositions described herein may be delivered to a target cell by any suitable means. RNA molecule compositions of the present invention may be targeted to any cell which contains and/or expresses a dominant negative allele, including any mammalian or plant cell. For example, in one embodiment a guide sequence specifically targets a mutated BEST1 allele and the target cell is a retinal cell such as pigment epithelium (RPE), photoreceptors (e.g., rod and cone), glial cells (e.g., Müller), and ganglion cells. In some embodiments, the target cell is RPE. Further, the nucleic acid compositions described herein may be delivered as DNA molecules, RNA molecules, Ribonucleoproteins (RNP), nucleic acid vectors, or any combination thereof.

[0129] In some embodiments, the RNA molecule comprises a chemical modification. Non-limiting examples of suitable chemical modifications include 2′-0-methyl (M), 2′-0-methyl, 3′phosphorothioate (MS) or 2′-0-methyl, 3 ‘thioPACE (MSP), pseudouridine, and 1-methyl pseudo-uridine. Each possibility represents a separate embodiment of the present invention.

[0130] Any suitable viral vector system may be used to deliver nucleic acid compositions e.g., the RNA molecule compositions of the subject invention. Conventional viral and non-viral based gene transfer methods can be used to introduce nucleic acids and target tissues. In certain embodiments, nucleic acids are administered for in vivo or ex vivo gene therapy uses. Non-viral vector delivery systems include naked nucleic acid, and nucleic acid complexed with a delivery vehicle such as a liposome or poloxamer. For a review of gene therapy procedures, see Anderson (1992) Science 256:808-813; Nabel & Felgner (1993) TIBTECH 11:211-217; Mitani & Caskey (1993) TIBTECH 11:162-166; Dillon (1993) TIBTECH 11:167-175; Miller (1992) Nature 357:455-460; Van Brunt (1988) Biotechnology 6(10):1149-1154; Vigne (1995) Restorative Neurology and Neuroscience 8:35-36; Kremer & Perricaudet (1995) British Medical Bulletin 51(1):31-44; Haddada et al. (1995) in Current Topics in Microbiology and Immunology Doerfler and Bohm (eds.); and Yu et al. (1994) Gene Therapy 1:13-26.

[0131] Methods of non-viral delivery of nucleic acids and/or proteins include electroporation, lipofection, microinjection, biolistics, particle gun acceleration, virosomes, liposomes, immunoliposomes, lipid nanoparticles (LNPs), polycation or lipid:nucleic acid conjugates, artificial virions, and agent-enhanced uptake of nucleic acids or can be delivered to plant cells by bacteria or viruses (e.g., Agrobacterium, Rhizobium sp. NGR234, Sinorhizoboiummeliloti, Mesorhizobium loti, tobacco mosaic virus, potato virus X, cauliflower mosaic virus and cassava vein mosaic virus). (See, e.g., Chung et al. (2006) Trends Plant Sci. 11(1): 1-4). Sonoporation using, e.g., the Sonitron 2000 system (Rich-Mar), can also be used for delivery of nucleic acids. Cationic-lipid mediated delivery of proteins and/or nucleic acids is also contemplated as an in vivo or in vitro delivery method. (See Zuris et al. (2015) Nat. Biotechnol. 33(1):73-80; see also Coelho et al. (2013) N. Engl. J. Med. 369, 819-829; Judge et al. (2006) Mol. Ther. 13, 494-505; and Basha et al. (2011) Mol. Ther. 19, 2186-2200).

[0132] Additional exemplary nucleic acid delivery systems include those provided by Amaxa.RTM. Biosystems (Cologne, Germany), Maxcyte, Inc. (Rockville, Md.), BTX Molecular Delivery Systems (Holliston, Mass.) and Copernicus Therapeutics Inc., (see, e.g., U.S. Pat. No. 6,008,336). Lipofection is described in e.g., U.S. Pat. No. 5,049,386, U.S. Pat. No. 4,946,787; and U.S. Pat. No. 4,897,355, and lipofection reagents are sold commercially (e.g., Transfectam.TM., Lipofectin.TM. and Lipofectamine.TM. RNAiMAX). Cationic and neutral lipids that are suitable for efficient receptor-recognition lipofection of polynucleotides include those of Felgner, WO 91/17424, WO 91/16024. Delivery can be to cells (ex vivo administration) or target tissues (in vivo administration).

[0133] The preparation of lipid:nucleic acid complexes, including targeted liposomes such as immunolipid complexes, is well known to one of skill in the art (See, e.g., Crystal (1995) Science 270:404-410; Blaese et al. (1995) Cancer Gene Ther. 2:291-297; Behr et al. (1994) Bioconjugate Chem. 5:382-389; Remy et al. (1994) Bioconjugate Chem. 5:647-654; Gao et al. (1995) Gene Therapy 2:710-722; Ahmad et al. (1992) Cancer Res. 52:4817-4820; U.S. Pat. Nos. 4,186,183, 4,217,344, 4,235,871, 4,261,975, 4,485,054, 4,501,728, 4,774,085, 4,837,028, and 4,946,787).

[0134] Additional methods of delivery include the use of packaging the nucleic acids to be delivered into EnGeneIC delivery vehicles (EDVs). These EDVs are specifically delivered to target tissues using bispecific antibodies where one arm of the antibody has specificity for the target tissue and the other has specificity for the EDV. The antibody brings the EDVs to the target cell surface and then the EDV is brought into the cell by endocytosis. Once in the cell, the contents are released (See MacDiarmid et al (2009) Nature Biotechnology 27(7):643).

[0135] The use of RNA or DNA viral based systems for viral mediated delivery of nucleic acids take advantage of highly evolved processes for targeting a virus to specific cells in the body and trafficking the viral payload to the nucleus. Viral vectors can be administered directly to patients (in vivo) or they can be used to treat cells in vitro and the modified cells are administered to patients (ex vivo). Conventional viral based systems for the delivery of nucleic acids include, but are not limited to, retroviral, lentivirus, adenoviral, adeno-associated, vaccinia and herpes simplex virus vectors for gene transfer.

[0136] The tropism of a retrovirus can be altered by incorporating foreign envelope proteins, expanding the potential target population of target cells. Lentiviral vectors are retroviral vectors that are able to transduce or infect non-dividing cells and typically produce high viral titers. Selection of a retroviral gene transfer system depends on the target tissue. Retroviral vectors are comprised of cis-acting long terminal repeats with packaging capacity for up to 6-10 kb of foreign sequence. The minimum cis-acting LTRs are sufficient for replication and packaging of the vectors, which are then used to integrate the therapeutic gene into the target cell to provide permanent transgene expression. Widely used retroviral vectors include those based upon murine leukemia virus (MuLV), gibbon ape leukemia virus (GaLV), Simian Immunodeficiency virus (SIV), human immunodeficiency virus (HIV), and combinations thereof (See, e.g., Buchschacher et al. (1992) J. Virol. 66:2731-2739; Johann et al. (1992) J. Virol. 66:1635-1640; Sommerfelt et al. (1990) Virol. 176:58-59; Wilson et al. (1989) J. Virol. 63:2374-2378; Miller et al. (1991) J. Virol. 65:2220-2224; PCT/US94/05700).

[0137] At least six viral vector approaches are currently available for gene transfer in clinical trials, which utilize approaches that involve complementation of defective vectors by genes inserted into helper cell lines to generate the transducing agent.

[0138] pLASN and MFG-S are examples of retroviral vectors that have been used in clinical trials (Dunbar et al. (1995) Blood 85:3048-305; Kohn et al.(1995) Nat. Med. 1:1017-102; Malech et al. (1997) PNAS 94:22 12133-12138). PA317/pLASN was the first therapeutic vector used in a gene therapy trial. (Blaese et al. (1995). Transduction efficiencies of 50% or greater have been observed for MFG-S packaged vectors. (Ellem et al. (1997) Immunol Immunother. 44(1):10-20; Dranoff et al. (1997) Hum. Gene Ther. 1:111-2).

[0139] Packaging cells are used to form virus particles that are capable of infecting a host cell. Such cells include 293 cells, which package adenovirus, AAV, and Psi-2 cells or PA317 cells, which package retrovirus. Viral vectors used in gene therapy are usually generated by a producer cell line that packages a nucleic acid vector into a viral particle. The vectors typically contain the minimal viral sequences required for packaging and subsequent integration into a host (if applicable), other viral sequences being replaced by an expression cassette encoding the protein to be expressed. The missing viral functions are supplied in trans by the packaging cell line. For example, AAV vectors used in gene therapy typically only possess inverted terminal repeat (ITR) sequences from the AAV genome which are required for packaging and integration into the host genome. Viral DNA is packaged in a cell line, which contains a helper plasmid encoding the other AAV genes, namely rep and cap, but lacking ITR sequences. The cell line is also infected with adenovirus as a helper. The helper virus promotes replication of the AAV vector and expression of AAV genes from the helper plasmid. The helper plasmid is not packaged in significant amounts due to a lack of ITR sequences. Contamination with adenovirus can be reduced by, e.g., heat treatment to which adenovirus is more sensitive than AAV. Additionally, AAV can be produced at clinical scale using baculovirus systems (see U.S. Pat. No. 7,479,554).

[0140] In many gene therapy applications, it is desirable that the gene therapy vector be delivered with a high degree of specificity to a particular tissue type. Accordingly, a viral vector can be modified to have specificity for a given cell type by expressing a ligand as a fusion protein with a viral coat protein on the outer surface of the virus. The ligand is chosen to have affinity for a receptor known to be present on the cell type of interest. For example, Han et al. (1995) Proc. Natl. Acad. Sci. USA 92:9747-9751, reported that Moloney murine leukemia virus can be modified to express human heregulin fused to gp70, and the recombinant virus infects certain human breast cancer cells expressing human epidermal growth factor receptor. This principle can be extended to other virus-target cell pairs, in which the target cell expresses a receptor and the virus expresses a fusion protein comprising a ligand for the cell-surface receptor. For example, filamentous phage can be engineered to display antibody fragments (e.g., FAB or Fv) having specific binding affinity for virtually any chosen cellular receptor. Although the above description applies primarily to viral vectors, the same principles can be applied to nonviral vectors. Such vectors can be engineered to contain specific uptake sequences which favor uptake by specific target cells.

[0141] Gene therapy vectors can be delivered in vivo by administration to an individual patient, typically by systemic administration (e.g., intravitreal, intravenous, intraperitoneal, intramuscular, subdermal, or intracranial infusion) or topical application, as described below. Alternatively, vectors can be delivered to cells ex vivo, such as cells explanted from an individual patient (e.g., lymphocytes, bone marrow aspirates, tissue biopsy) or universal donor hematopoietic stem cells, followed by reimplantation of the cells into a patient, usually after selection for cells which have incorporated the vector.

[0142] Ex vivo cell transfection for diagnostics, research, or for gene therapy (e.g., via re-infusion of the transfected cells into the host organism) is well known to those of skill in the art. In a preferred embodiment, cells are isolated from the subject organism, transfected with a nucleic acid composition, and re-infused back into the subject organism (e.g., patient). Various cell types suitable for ex vivo transfection are well known to those of skill in the art (See, e.g., Freshney et al. (1994) Culture of Animal Cells, A Manual of Basic Technique, 3rd ed, and the references cited therein for a discussion of how to isolate and culture cells from patients).

[0143] Suitable cells include, but are not limited to, eukaryotic cells and/or cell lines. Non-limiting examples of such cells or cell lines generated from such cells include COS, CHO (e.g., CHO--S, CHO-K1, CHO-DG44, CHO-DUXB11, CHO-DUKX, CHOK1SV), VERO, MDCK, WI38, V79, B14AF28-G3, BHK, HaK, NSO, SP2/0-Ag14, HeLa, HEK293 (e.g., HEK293-F, HEK293-H, HEK293-T), perC6 cells, any plant cell (differentiated or undifferentiated), as well as insect cells such as Spodopterafugiperda (Sf), or fungal cells such as Saccharomyces, Pichia and Schizosaccharomyces. In certain embodiments, the cell line is a CHO-K1, MDCK or HEK293 cell line. Additionally, primary cells may be isolated and used ex vivo for reintroduction into the subject to be treated following treatment with a guided nuclease system (e.g. CRISPR/Cas). Suitable primary cells include peripheral blood mononuclear cells (PBMC), and other blood cell subsets such as, but not limited to, CD4+ T cells or CD8+ T cells. Suitable cells also include stem cells such as, by way of example, embryonic stem cells, induced pluripotent stem cells, hematopoietic stem cells (CD34+), neuronal stem cells and mesenchymal stem cells.

[0144] In one embodiment, stem cells are used in ex vivo procedures for cell transfection and gene therapy. The advantage to using stem cells is that they can be differentiated into other cell types in vitro, or can be introduced into a mammal (such as the donor of the cells) where they will engraft in the bone marrow. Methods for differentiating CD34+ cells in vitro into clinically important immune cell types using cytokines such a GM-CSF, IFN-gamma, and TNF-alpha are known (as a non-limiting example see, Inaba et al., J. Exp. Med. 176:1693-1702 (1992)).

[0145] Stem cells are isolated for transduction and differentiation using known methods. For example, stem cells are isolated from bone marrow cells by panning the bone marrow cells with antibodies which bind unwanted cells, such as CD4+ and CD8+ (T cells), CD45+(panB cells), GR-1 (granulocytes), and Iad (differentiated antigen presenting cells) (as anon-limiting example see Inaba et al. (1992) J. Exp. Med. 176:1693-1702). Stem cells that have been modified may also be used in some embodiments.

[0146] Any one of the RNA molecule compositions described herein is suitable for genome editing in post-mitotic cells or any cell which is not actively dividing, e.g., arrested cells. Examples of post-mitotic cells which may be edited using a composition of the present invention include, but are not limited to, a photoreceptor cell, a rod photoreceptor cell, a cone photoreceptor cell, a retinal pigment epithelium (RPE), a glial cell, Muller cell, and a ganglion.

[0147] Vectors (e.g., retroviruses, liposomes, etc.) containing therapeutic nucleic acid compositions can also be administered directly to an organism for transduction of cells in vivo. Administration is by any of the routes normally used for introducing a molecule into ultimate contact with blood or tissue cells including, but not limited to, injection, infusion, topical application (e.g., eye drops and cream) and electroporation. Suitable methods of administering such nucleic acids are available and well known to those of skill in the art, and, although more than one route can be used to administer a particular composition, a particular route can often provide a more immediate and more effective reaction than another route. According to some embodiments, the composition is delivered via sub-retinal injection. According to some embodiments, the composition is delivered via intravitreal injection.

[0148] Vectors suitable for introduction of transgenes into immune cells (e.g., T-cells) include non-integrating lentivirus vectors. See, e.g., U.S. Pat. Publication No. 2009- 0117617.

[0149] Pharmaceutically acceptable carriers are determined in part by the particular composition being administered, as well as by the particular method used to administer the composition. Accordingly, there is a wide variety of suitable formulations of pharmaceutical compositions available, as described below (See, e.g., Remington’s Pharmaceutical Sciences, 17th ed., 1989).

[0150] In accordance with some embodiments, there is provided an RNA molecule which binds to/ associates with and/or directs the RNA guided DNA nuclease to a sequence comprising at least one nucleotide which differs between a mutated allele and a functional allele (e.g., SNP) of a gene of interest (i.e., a sequence of the mutated allele which is not present in the functional allele). The sequence may be within the disease associated mutation. The sequence may be upstream or downstream to the disease associated mutation. Any sequence difference between the mutated allele and the functional allele may be targeted by an RNA molecule of the present invention to inactivate the mutant allele, or otherwise disable its dominant disease-causing effects, while preserving the activity of the functional allele.

[0151] The disclosed compositions and methods may also be used in the manufacture of a medicament for treating dominant genetic disorders in a patient.

### Examples of RNA Guide Sequences Which Specifically Target Mutated Alleles of BEST1 Gene

[0152] Although a large number of guide sequences can be designed to target a mutated allele, the nucleotide sequences described in Tables 2 identified by SEQ ID NOs: 1-3010 below were specifically selected to effectively implement the methods set forth herein and to effectively discriminate between alleles.

[0153] Referring to columns 1-4, each of SEQ ID NOs. 1-3010 indicated in column 1 corresponds to an engineered guide sequence. The corresponding SNP details are indicated in column 2. The SNP details indicated in the 2nd column include the assigned identifier for each SNP corresponding to a SNP ID indicated in Table 1. Column 3 indicates whether the target of each guide sequence is the BEST1 gene polymorph or wild type (REF) sequence. Column 4 indicates the guanine-cytosine content of each guide sequence.

[0154] Table 2 shows guide sequences designed for use as described in the embodiments above to associate with different SNPs within a sequence of a mutated BEST1 allele. Each engineered guide molecule is further designed such as to associate with a target genomic DNA sequence of interest that lies next to a protospacer adjacent motif (PAM), e.g., a PAM matching the sequence NGG or NAG, where “N” is any nucleobase. The guide sequences were designed to work in conjunction with one or more different CRISPR nucleases, including, but not limited to, e.g. SpCas9WT (PAM SEQ: NGG), SpCas9.VQR.1 (PAM SEQ: NGAN), SpCas9.VQR.2 (PAM SEQ: NGNG), SpCas9.EQR (PAM SEQ: NGAG), SpCas9.VRER (PAM SEQ: NGCG), SaCas9WT (PAM SEQ: NNGRRT), NmCas9WT (PAM SEQ: NNNNGATT), Cpfl (PAM SEQ: TTTV), or JeCas9WT (PAM SEQ: NNNVRYM). RNA molecules of the present invention are each designed to form complexes in conjunction with one or more different CRISPR nucleases and designed to target polynucleotide sequences of interest utilizing one or more different PAM sequences respective to the CRISPR nuclease utilized

TABLE 2

Guide sequences designed to associate with specific SNPs of the BEST1 gene

| SEQ ID NO: | SNP ID (Table 1) | Target (SNP/REF) | %GC |
|---|---|---|---|
| 1 | s1 | BOTH | 45% |
| 2 | s1 | BOTH | 45% |
| 3 | s2 | BOTH | 70% |
| 7 | s6 | BOTH | 50% |
| 8 | s6 | BOTH | 50% |
| 9 | s8 | BOTH | 45% |
| 10 | s9 | BOTH | 50% |
| 11 | s9 | BOTH | 55% |
| 12 | s12 | BOTH | 65% |
| 13 | s13 | BOTH | 60% |
| 14 | s14 | BOTH | 60% |
| 15 | s14 | BOTH | 65% |
| 16 | s15 | BOTH | 75% |
| 17 | s16 | BOTH | 40% |
| 18 | s16 | BOTH | 40% |
| 19 | s17 | BOTH | 55% |
| 20 | s20 | BOTH | 45% |
| 21 | s21,s22 | BOTH,BOTH | 45% |
| 22 | s23 | BOTH | 50% |
| 23 | s23 | BOTH | 50% |
| 24 | s24 | BOTH | 50% |
| 25 | s24 | BOTH | 50% |
| 26 | s27 | BOTH | 50% |
| 27 | s29 | BOTH | 35% |
| 28 | s31 | BOTH | 65% |
| 29 | s31 | BOTH | 65% |
| 30 | s32 | BOTH | 45% |
| 31 | s32 | BOTH | 45% |
| 32 | s35 | BOTH | 55% |
| 33 | s35 | BOTH | 55% |
| 34 | s36 | BOTH | 40% |
| 35 | s38 | BOTH | 60% |
| 36 | s40 | BOTH | 45% |
| 37 | s41 | BOTH | 55% |
| 38 | s41 | BOTH | 70% |
| 39 | s41 | BOTH | 55% |
| 40 | s42 | BOTH | 45% |
| 41 | s43 | BOTH | 40% |
| 42 | s43 | BOTH | 50% |
| 79 | s62 | BOTH | 40% |
| 80 | s63 | BOTH | 45% |
| 81 | s63 | BOTH | 55% |
| 82 | s63 | BOTH | 35% |
| 83 | s65 | BOTH | 50% |
| 84 | s65 | BOTH | 45% |
| 85 | s66 | BOTH | 80% |
| 86 | s66 | BOTH | 80% |
| 87 | s67 | BOTH | 35% |
| 88 | s69 | BOTH | 65% |
| 89 | s69 | BOTH | 60% |
| 90 | s69 | BOTH | 70% |
| 91 | s71 | BOTH | 70% |
| 92 | s71 | BOTH | 70% |
| 93 | s72 | BOTH | 40% |
| 94 | s72 | BOTH | 45% |
| 95 | s73 | BOTH | 60% |
| 96 | s74 | BOTH | 50% |
| 97 | s74 | BOTH | 50% |
| 98 | s76 | BOTH | 45% |
| 99 | s76 | BOTH | 40% |
| 100 | s79 | REF | 35% |
| 101 | s80 | SNP | 45% |
| 102 | s1 | SNP | 45% |
| 103 | s1 | REF | 40% |
| 104 | s1 | SNP | 50% |
| 105 | s1 | REF | 45% |
| 106 | s1 | SNP | 45% |
| 107 | s1 | REF | 40% |
| 108 | s1 | SNP | 50% |
| 109 | s1 | REF | 45% |
| 110 | s2 | SNP | 65% |
| 111 | s2 | REF | 70% |
| 112 | s2 | SNP | 55% |
| 113 | s2 | REF | 60% |
| 114 | s3 | REF | 60% |
| 151 | s7 | SNP | 55% |
| 152 | s7 | SNP | 50% |
| 153 | s7 | REF | 55% |
| 154 | s7 | REF | 65% |
| 155 | s7 | REF | 55% |
| 156 | s7 | SNP | 50% |
| 157 | s7 | SNP | 60% |
| 158 | s7 | SNP | 50% |
| 159 | s7 | REF | 55% |
| 160 | s7 | SNP | 50% |
| 161 | s7 | REF | 55% |
| 162 | s7 | REF | 60% |
| 163 | s7 | SNP | 55% |
| 164 | s7 | REF | 55% |
| 165 | s7 | SNP | 50% |
| 166 | s8 | SNP | 45% |
| 167 | s8 | REF | 45% |
| 168 | s8 | SNP | 50% |
| 169 | s8 | REF | 45% |
| 170 | s8 | SNP | 50% |
| 171 | s8 | REF | 40% |
| 172 | s9 | SNP | 50% |
| 173 | s9 | REF | 55% |
| 174 | s9 | SNP | 65% |
| 175 | s9 | REF | 70% |
| 176 | s9 | SNP | 55% |
| 177 | s9 | REF | 60% |
| 178 | s9 | SNP | 60% |
| 179 | s9 | REF | 65% |
| 180 | s10 | SNP | 35% |
| 181 | s10 | REF | 40% |
| 182 | s10 | REF | 30% |
| 183 | s10 | REF | 30% |
| 184 | s11 | REF | 30% |
| 185 | s12 | REF | 65% |
| 186 | s12 | SNP | 70% |
| 223 | s15 | SNP | 85% |
| 224 | s15 | REF | 85% |
| 225 | s15 | SNP | 80% |
| 226 | s15 | REF | 80% |
| 227 | s15 | SNP | 70% |
| 228 | s15 | REF | 70% |
| 229 | s15 | SNP | 70% |
| 230 | s15 | REF | 70% |
| 231 | s15 | SNP | 75% |
| 232 | s15 | REF | 75% |
| 233 | s15 | SNP | 80% |
| 234 | s15 | REF | 80% |
| 235 | s15 | SNP | 65% |
| 236 | s15 | REF | 65% |
| 237 | s16 | REF | 45% |
| 238 | s16 | SNP | 40% |
| 239 | s16 | REF | 60% |
| 240 | s16 | SNP | 55% |
| 241 | s16 | REF | 60% |
| 242 | s16 | SNP | 55% |
| 243 | s16 | SNP | 55% |
| 244 | s16 | REF | 60% |
| 245 | s17 | SNP | 60% |
| 246 | s17 | REF | 65% |
| 247 | s17 | REF | 65% |
| 248 | s17 | SNP | 60% |
| 249 | s17 | SNP | 65% |
| 250 | s17 | REF | 70% |
| 251 | s17 | REF | 55% |
| 252 | s17 | SNP | 50% |
| 253 | s17 | REF | 65% |
| 254 | s17 | SNP | 60% |
| 255 | s17 | REF | 65% |
| 256 | s17 | SNP | 60% |
| 257 | s18 | REF | 55% |
| 258 | s18 | SNP | 50% |
| 295 | s24 | REF | 55% |
| 296 | s24 | SNP | 50% |
| 297 | s24 | REF | 50% |
| 298 | s24 | SNP | 45% |
| 299 | s24 | REF | 55% |
| 300 | s24 | SNP | 50% |
| 301 | s24 | SNP | 50% |
| 302 | s25 | SNP | 55% |
| 303 | s25 | REF | 60% |
| 304 | s25 | REF | 55% |
| 305 | s25 | REF | 65% |
| 306 | s25 | SNP | 60% |
| 307 | s25 | SNP | 50% |
| 308 | s25 | REF | 50% |
| 309 | s25 | SNP | 45% |
| 310 | s26 | REF | 65% |
| 311 | s26 | SNP | 60% |
| 312 | s26 | REF | 70% |
| 313 | s26 | SNP | 65% |
| 314 | s26 | SNP | 60% |
| 315 | s26 | REF | 65% |
| 316 | s26 | SNP | 35% |
| 317 | s26 | REF | 40% |
| 318 | s26 | SNP | 50% |
| 319 | s26 | REF | 55% |
| 320 | s26 | SNP | 60% |
| 321 | s26 | REF | 65% |
| 322 | s26 | REF | 65% |
| 323 | s26 | SNP | 60% |
| 324 | s26 | SNP | 55% |
| 325 | s26 | REF | 60% |
| 326 | s27 | REF | 50% |
| 327 | s27 | SNP | 45% |
| 328 | s27 | SNP | 45% |
| 329 | s28 | SNP | 60% |
| 330 | s28 | REF | 55% |
| 367 | s32 | REF | 45% |
| 368 | s32 | SNP | 50% |
| 369 | s33 | SNP | 55% |
| 370 | s33 | REF | 60% |
| 371 | s33 | SNP | 60% |
| 372 | s33 | REF | 65% |
| 373 | s33 | SNP | 60% |
| 374 | s33 | REF | 65% |
| 375 | s34 | SNP | 60% |
| 376 | s34 | REF | 65% |
| 377 | s34 | SNP | 60% |
| 378 | s34 | REF | 65% |
| 379 | s34 | REF | 65% |
| 380 | s34 | SNP | 60% |
| 381 | s35 | REF | 60% |
| 382 | s35 | REF | 65% |
| 383 | s35 | REF | 65% |
| 384 | s35 | SNP | 60% |
| 385 | s35 | REF | 60% |
| 386 | s36 | SNP | 55% |
| 387 | s36 | REF | 50% |
| 388 | s36 | SNP | 45% |
| 389 | s36 | REF | 40% |
| 390 | s36 | REF | 50% |
| 391 | s36 | SNP | 55% |
| 392 | s36 | REF | 40% |
| 393 | s36 | SNP | 45% |
| 394 | s37 | REF | 65% |
| 395 | s37 | SNP | 60% |
| 396 | s37 | SNP | 55% |
| 397 | s37 | REF | 60% |
| 398 | s37 | SNP | 55% |
| 399 | s37 | REF | 60% |
| 400 | s37 | REF | 55% |
| 401 | s37 | SNP | 50% |
| 402 | s37 | SNP | 60% |
| 439 | s40 | REF | 40% |
| 440 | s41 | REF | 70% |
| 441 | s41 | SNP | 70% |
| 442 | s41 | REF | 60% |
| 443 | s41 | REF | 60% |
| 444 | s41 | REF | 70% |
| 445 | s41 | SNP | 60% |
| 446 | s41 | REF | 60% |
| 447 | s41 | REF | 60% |
| 448 | s41 | SNP | 60% |
| 449 | s41 | REF | 65% |
| 450 | s41 | SNP | 65% |
| 451 | s41 | SNP | 70% |
| 452 | s41 | SNP | 65% |
| 453 | s41 | REF | 65% |
| 454 | s41 | REF | 65% |
| 455 | s41 | REF | 70% |
| 456 | s41 | REF | 70% |
| 457 | s41 | REF | 65% |
| 458 | s42 | SNP | 65% |
| 459 | s42 | REF | 70% |
| 460 | s42 | SNP | 55% |
| 461 | s42 | REF | 60% |
| 462 | s42 | REF | 55% |
| 463 | s42 | SNP | 50% |
| 464 | s43 | SNP | 45% |
| 465 | s43 | REF | 50% |
| 466 | s43 | SNP | 55% |
| 467 | s43 | REF | 60% |
| 468 | s43 | SNP | 50% |
| 469 | s43 | REF | 55% |
| 470 | s43 | SNP | 70% |
| 471 | s43 | SNP | 65% |
| 472 | s43 | REF | 70% |
| 473 | s43 | SNP | 60% |
| 474 | s43 | REF | 65% |
| 511 | s53 | SNP | 30% |
| 512 | s53 | REF | 30% |
| 513 | s53 | SNP | 30% |
| 514 | s54 | SNP | 45% |
| 515 | s54 | REF | 40% |
| 516 | s54 | REF | 40% |
| 517 | s54 | SNP | 45% |
| 518 | s54 | REF | 40% |
| 519 | s54 | SNP | 45% |
| 520 | s54 | REF | 40% |
| 521 | s54 | SNP | 45% |
| 522 | s54 | SNP | 45% |
| 523 | s54 | REF | 40% |
| 524 | s55 | SNP | 45% |
| 525 | s55 | REF | 50% |
| 526 | s55 | SNP | 50% |
| 527 | s55 | REF | 55% |
| 528 | s55 | SNP | 40% |
| 529 | s55 | REF | 45% |
| 530 | s55 | SNP | 40% |
| 531 | s55 | REF | 45% |
| 532 | s56 | SNP | 35% |
| 533 | s56 | REF | 40% |
| 534 | s56 | REF | 40% |
| 535 | s56 | SNP | 35% |
| 536 | s56 | SNP | 40% |
| 537 | s56 | REF | 45% |
| 538 | s56 | REF | 55% |
| 539 | s56 | SNP | 50% |
| 540 | s56 | REF | 50% |
| 541 | s56 | SNP | 45% |
| 542 | s56 | REF | 40% |
| 543 | s56 | SNP | 35% |
| 544 | s57 | REF | 30% |
| 545 | s57 | REF | 35% |
| 546 | s57 | SNP | 30% |
| 583 | s62 | SNP | 50% |
| 584 | s62 | REF | 55% |
| 585 | s62 | REF | 55% |
| 586 | s63 | REF | 55% |
| 587 | s63 | SNP | 50% |
| 588 | s63 | SNP | 55% |
| 589 | s63 | REF | 60% |
| 590 | s63 | SNP | 50% |
| 591 | s63 | REF | 55% |
| 592 | s63 | SNP | 50% |
| 593 | s63 | REF | 55% |
| 594 | s63 | SNP | 45% |
| 595 | s63 | REF | 50% |
| 596 | s63 | SNP | 45% |
| 597 | s63 | REF | 50% |
| 598 | s64 | REF | 45% |
| 599 | s64 | SNP | 40% |
| 600 | s64 | REF | 55% |
| 601 | s64 | SNP | 50% |
| 602 | s65 | SNP | 50% |
| 603 | s65 | REF | 45% |
| 604 | s65 | REF | 45% |
| 605 | s65 | SNP | 50% |
| 606 | s65 | REF | 45% |
| 607 | s65 | SNP | 50% |
| 608 | s66 | SNP | 75% |
| 609 | s66 | REF | 80% |
| 610 | s66 | REF | 60% |
| 611 | s66 | SNP | 55% |
| 612 | s66 | REF | 60% |
| 613 | s66 | REF | 65% |
| 614 | s66 | SNP | 60% |
| 615 | s66 | SNP | 60% |
| 616 | s66 | REF | 65% |
| 617 | s66 | REF | 65% |
| 618 | s66 | REF | 65% |
| 655 | s71 | REF | 80% |
| 656 | s71 | REF | 80% |
| 657 | s71 | SNP | 80% |
| 658 | s71 | REF | 80% |
| 659 | s71 | SNP | 80% |
| 660 | s71 | REF | 85% |
| 661 | s71 | SNP | 85% |
| 662 | s71 | SNP | 70% |
| 663 | s71 | SNP | 75% |
| 664 | s71 | REF | 75% |
| 665 | s71 | REF | 70% |
| 666 | s71 | SNP | 75% |
| 667 | s71 | REF | 75% |
| 668 | s72 | REF | 45% |
| 669 | s72 | SNP | 40% |
| 670 | s72 | REF | 45% |
| 671 | s72 | REF | 45% |
| 672 | s72 | REF | 50% |
| 673 | s72 | SNP | 45% |
| 674 | s72 | SNP | 40% |
| 675 | s72 | REF | 45% |
| 676 | s72 | REF | 50% |
| 677 | s72 | SNP | 45% |
| 678 | s73 | REF | 55% |
| 679 | s73 | SNP | 50% |
| 680 | s73 | SNP | 50% |
| 681 | s73 | REF | 55% |
| 682 | s73 | REF | 60% |
| 683 | s73 | SNP | 55% |
| 684 | s73 | SNP | 50% |
| 685 | s73 | REF | 55% |
| 686 | s73 | REF | 55% |
| 687 | s73 | SNP | 50% |
| 688 | s74 | SNP | 50% |
| 689 | s74 | REF | 45% |
| 690 | s74 | SNP | 40% |
| 727 | s5 | BOTH | 55% |
| 728 | s6 | BOTH | 45% |
| 729 | s7 | BOTH | 60% |
| 730 | s7 | BOTH | 60% |
| 731 | s8 | BOTH | 50% |
| 732 | s8 | BOTH | 50% |
| 733 | s8 | BOTH | 50% |
| 734 | s9 | BOTH | 65% |
| 735 | s9 | BOTH | 60% |
| 736 | s10 | BOTH | 40% |
| 737 | s10 | BOTH | 35% |
| 738 | s11 | BOTH | 45% |
| 739 | s12 | BOTH | 45% |
| 740 | s12 | BOTH | 50% |
| 741 | s12 | BOTH | 65% |
| 742 | s13 | BOTH | 70% |
| 743 | s13 | BOTH | 60% |
| 744 | s13 | BOTH | 55% |
| 745 | s14 | BOTH | 50% |
| 746 | s14 | BOTH | 60% |
| 747 | s14 | BOTH | 50% |
| 748 | s14 | BOTH | 65% |
| 749 | s14 | BOTH | 50% |
| 750 | s15 | BOTH | 70% |
| 751 | s15 | BOTH | 65% |
| 752 | s15 | BOTH | 75% |
| 753 | s16 | BOTH | 70% |
| 754 | s16 | BOTH | 60% |
| 755 | s17 | BOTH | 60% |
| 756 | s17 | BOTH | 65% |
| 757 | s17 | BOTH | 50% |
| 758 | s18 | BOTH | 50% |
| 759 | s18 | BOTH | 50% |
| 760 | s18 | BOTH | 55% |
| 761 | s18 | BOTH | 50% |
| 762 | s19 | BOTH | 40% |
| 799 | s34 | BOTH | 50% |
| 800 | s34 | BOTH | 55% |
| 801 | s34 | BOTH | 70% |
| 802 | s34 | BOTH | 70% |
| 803 | s35 | BOTH | 55% |
| 804 | s35 | BOTH | 55% |
| 805 | s35 | BOTH | 55% |
| 806 | s35 | BOTH | 50% |
| 807 | s35 | BOTH | 50% |
| 808 | s35 | BOTH | 60% |
| 809 | s35 | BOTH | 55% |
| 810 | s35 | BOTH | 50% |
| 811 | s35 | BOTH | 50% |
| 812 | s35 | BOTH | 60% |
| 813 | s35 | BOTH | 55% |
| 814 | s35 | BOTH | 60% |
| 815 | s35 | BOTH | 65% |
| 816 | s35 | BOTH | 55% |
| 817 | s35 | BOTH | 55% |
| 818 | s36 | BOTH | 45% |
| 819 | s36 | BOTH | 40% |
| 820 | s36 | BOTH | 40% |
| 821 | s37 | BOTH | 65% |
| 822 | s37 | BOTH | 80% |
| 823 | s37 | BOTH | 75% |
| 824 | s37 | BOTH | 65% |
| 825 | s38 | BOTH | 50% |
| 826 | s38 | BOTH | 55% |
| 827 | s38 | BOTH | 55% |
| 828 | s39 | BOTH | 45% |
| 829 | s39 | BOTH | 35% |
| 830 | s40 | BOTH | 45% |
| 831 | s40 | BOTH | 45% |
| 832 | s40 | BOTH | 50% |
| 833 | s41 | BOTH | 70% |
| 834 | s41 | BOTH | 65% |
| 871 | s48,s47 | REF,REF | 70% |
| 872 | s48,s47 | REF,REF | 70% |
| 873 | s48,s47 | REF,REF | 65% |
| 874 | s48,s47 | REF,REF | 65% |
| 875 | s48,s47 | REF,REF | 65% |
| 876 | s48,s47 | REF,REF | 65% |
| 877 | s48,s47 | REF,REF | 60% |
| 878 | s48,s47 | REF,REF | 70% |
| 879 | s48,s47 | REF,REF | 70% |
| 880 | s48,s47 | REF,REF | 75% |
| 881 | s48,s47 | REF,REF | 75% |
| 882 | s48,s47 | REF,REF | 70% |
| 883 | s48,s47 | REF,REF | 65% |
| 884 | s49 | BOTH | 55% |
| 885 | s50 | BOTH | 60% |
| 886 | s50 | BOTH | 60% |
| 887 | s52 | BOTH | 45% |
| 888 | s52 | BOTH | 70% |
| 889 | s53 | BOTH | 55% |
| 890 | s53 | BOTH | 55% |
| 891 | s54 | BOTH | 60% |
| 892 | s55 | BOTH | 45% |
| 893 | s55 | BOTH | 35% |
| 894 | s56 | BOTH | 30% |
| 895 | s56 | BOTH | 55% |
| 896 | s56 | BOTH | 50% |
| 897 | s57 | BOTH | 40% |
| 898 | s57 | BOTH | 35% |
| 899 | s58 | BOTH | 45% |
| 900 | s58 | BOTH | 50% |
| 901 | s59 | BOTH | 50% |
| 902 | s60 | BOTH | 65% |
| 903 | s60 | BOTH | 65% |
| 904 | s61 | BOTH | 80% |
| 905 | s61 | BOTH | 80% |
| 906 | s62 | BOTH | 50% |
| 943 | s77 | BOTH | 70% |
| 944 | s77 | BOTH | 30% |
| 945 | s78 | BOTH | 40% |
| 946 | s78 | BOTH | 30% |
| 947 | s78 | BOTH | 30% |
| 948 | s79 | REF | 30% |
| 949 | s79 | REF | 40% |
| 950 | s79 | REF | 30% |
| 951 | s79 | REF | 35% |
| 952 | s80 | SNP | 45% |
| 953 | s80 | SNP | 35% |
| 954 | s80 | SNP | 45% |
| 955 | s80 | SNP | 45% |
| 956 | s80 | SNP | 45% |
| 957 | s80 | SNP | 45% |
| 958 | s80 | SNP | 40% |
| 959 | s80 | SNP | 40% |
| 960 | s1 | REF | 45% |
| 961 | s1 | SNP | 50% |
| 962 | s1 | SNP | 50% |
| 963 | s1 | REF | 45% |
| 964 | s1 | REF | 50% |
| 965 | s1 | SNP | 55% |
| 966 | s1 | SNP | 40% |
| 967 | s1 | REF | 35% |
| 968 | s1 | REF | 45% |
| 969 | s1 | SNP | 50% |
| 970 | s1 | REF | 40% |
| 971 | s1 | SNP | 45% |
| 972 | s1 | REF | 45% |
| 973 | s1 | REF | 50% |
| 974 | s1 | SNP | 55% |
| 975 | s1 | SNP | 50% |
| 976 | s1 | SNP | 55% |
| 977 | s1 | SNP | 55% |
| 978 | s1 | REF | 50% |
| 1015 | s3 | SNP | 65% |
| 1016 | s3 | SNP | 55% |
| 1017 | s3 | REF | 55% |
| 1018 | s3 | REF | 55% |
| 1019 | s3 | SNP | 55% |
| 1020 | s3 | REF | 55% |
| 1021 | s3 | REF | 60% |
| 1022 | s3 | SNP | 60% |
| 1023 | s3 | SNP | 60% |
| 1024 | s3 | SNP | 55% |
| 1025 | s3 | REF | 55% |
| 1026 | s3 | SNP | 55% |
| 1027 | s3 | REF | 55% |
| 1028 | s3 | SNP | 55% |
| 1029 | s3 | REF | 65% |
| 1030 | s3 | SNP | 65% |
| 1031 | s3 | REF | 60% |
| 1032 | s3 | SNP | 60% |
| 1033 | s3 | REF | 60% |
| 1034 | s3 | SNP | 60% |
| 1035 | s3 | REF | 60% |
| 1036 | s3 | SNP | 55% |
| 1037 | s4 | SNP | 50% |
| 1038 | s4 | REF | 45% |
| 1039 | s4 | REF | 50% |
| 1040 | s4 | SNP | 55% |
| 1041 | s4 | REF | 40% |
| 1042 | s4 | SNP | 45% |
| 1043 | s4 | SNP | 55% |
| 1044 | s4 | SNP | 50% |
| 1045 | s4 | REF | 45% |
| 1046 | s4 | SNP | 45% |
| 1047 | s4 | REF | 40% |
| 1048 | s4 | REF | 45% |
| 1049 | s4 | SNP | 50% |
| 1050 | s4 | REF | 45% |
| 1087 | s5 | REF | 65% |
| 1088 | s5 | REF | 65% |
| 1089 | s5 | REF | 60% |
| 1090 | s5 | SNP | 60% |
| 1091 | s5 | SNP | 60% |
| 1092 | s5 | REF | 60% |
| 1093 | s5 | REF | 60% |
| 1094 | s5 | SNP | 60% |
| 1095 | s5 | REF | 65% |
| 1096 | s5 | SNP | 65% |
| 1097 | s5 | REF | 65% |
| 1098 | s5 | SNP | 65% |
| 1099 | s6 | REF | 40% |
| 1100 | s6 | SNP | 45% |
| 1101 | s6 | SNP | 50% |
| 1102 | s6 | REF | 45% |
| 1103 | s6 | REF | 40% |
| 1104 | s6 | SNP | 45% |
| 1105 | s6 | SNP | 45% |
| 1106 | s6 | REF | 40% |
| 1107 | s6 | REF | 50% |
| 1108 | s6 | SNP | 55% |
| 1109 | s6 | SNP | 55% |
| 1110 | s6 | REF | 50% |
| 1111 | s6 | REF | 45% |
| 1112 | s6 | SNP | 50% |
| 1113 | s6 | REF | 40% |
| 1114 | s6 | SNP | 45% |
| 1115 | s6 | SNP | 55% |
| 1116 | s6 | REF | 50% |
| 1117 | s6 | REF | 50% |
| 1118 | s6 | SNP | 55% |
| 1119 | s6 | SNP | 45% |
| 1120 | s6 | REF | 40% |
| 1121 | s6 | SNP | 55% |
| 1122 | s6 | REF | 50% |
| 1159 | s8 | REF | 45% |
| 1160 | s8 | SNP | 50% |
| 1161 | s8 | SNP | 50% |
| 1162 | s8 | REF | 45% |
| 1163 | s8 | SNP | 45% |
| 1164 | s8 | REF | 40% |
| 1165 | s8 | REF | 35% |
| 1166 | s8 | SNP | 40% |
| 1167 | s8 | SNP | 50% |
| 1168 | s8 | REF | 45% |
| 1169 | s8 | SNP | 45% |
| 1170 | s8 | REF | 40% |
| 1171 | s8 | SNP | 45% |
| 1172 | s8 | REF | 40% |
| 1173 | s8 | REF | 40% |
| 1174 | s8 | SNP | 45% |
| 1175 | s8 | SNP | 40% |
| 1176 | s8 | REF | 35% |
| 1177 | s8 | SNP | 40% |
| 1178 | s8 | REF | 35% |
| 1179 | s8 | SNP | 50% |
| 1180 | s8 | REF | 45% |
| 1181 | s8 | SNP | 50% |
| 1182 | s8 | REF | 45% |
| 1183 | s8 | REF | 40% |
| 1184 | s8 | SNP | 45% |
| 1185 | s9 | SNP | 60% |
| 1186 | s9 | REF | 65% |
| 1187 | s9 | REF | 60% |
| 1188 | s9 | SNP | 55% |
| 1189 | s9 | REF | 55% |
| 1190 | s9 | SNP | 50% |
| 1191 | s9 | SNP | 60% |
| 1192 | s9 | REF | 65% |
| 1193 | s9 | SNP | 50% |
| 1194 | s9 | REF | 55% |
| 1231 | s11 | SNP | 45% |
| 1232 | s11 | SNP | 45% |
| 1233 | s11 | REF | 50% |
| 1234 | s11 | SNP | 50% |
| 1235 | s11 | REF | 55% |
| 1236 | s11 | SNP | 45% |
| 1237 | s11 | REF | 50% |
| 1238 | s11 | SNP | 40% |
| 1239 | s11 | REF | 45% |
| 1240 | s11 | REF | 50% |
| 1241 | s11 | SNP | 45% |
| 1242 | s11 | REF | 35% |
| 1243 | s11 | SNP | 30% |
| 1244 | s11 | REF | 50% |
| 1245 | s11 | SNP | 45% |
| 1246 | s11 | REF | 45% |
| 1247 | s11 | SNP | 40% |
| 1248 | s11 | REF | 55% |
| 1249 | s11 | SNP | 50% |
| 1250 | s11 | REF | 50% |
| 1251 | s11 | SNP | 45% |
| 1252 | s11 | REF | 40% |
| 1253 | s11 | SNP | 35% |
| 1254 | s11 | SNP | 35% |
| 1255 | s11 | REF | 40% |
| 1256 | s11 | SNP | 30% |
| 1257 | s11 | REF | 35% |
| 1258 | s12 | REF | 60% |
| 1259 | s12 | SNP | 65% |
| 1260 | s12 | SNP | 70% |
| 1261 | s12 | REF | 65% |
| 1262 | s12 | REF | 65% |
| 1263 | s12 | SNP | 70% |
| 1264 | s12 | SNP | 65% |
| 1265 | s12 | REF | 60% |
| 1266 | s12 | SNP | 70% |
| 1303 | s13 | REF | 75% |
| 1304 | s13 | REF | 65% |
| 1305 | s13 | REF | 75% |
| 1306 | s13 | SNP | 70% |
| 1307 | s13 | REF | 75% |
| 1308 | s13 | SNP | 70% |
| 1309 | s13 | REF | 75% |
| 1310 | s13 | SNP | 70% |
| 1311 | s13 | SNP | 60% |
| 1312 | s13 | REF | 70% |
| 1313 | s13 | SNP | 65% |
| 1314 | s13 | SNP | 65% |
| 1315 | s13 | REF | 70% |
| 1316 | s13 | REF | 75% |
| 1317 | s13 | SNP | 70% |
| 1318 | s14 | SNP | 60% |
| 1319 | s14 | REF | 55% |
| 1320 | s14 | SNP | 55% |
| 1321 | s14 | REF | 50% |
| 1322 | s14 | REF | 55% |
| 1323 | s14 | REF | 55% |
| 1324 | s14 | REF | 50% |
| 1325 | s14 | SNP | 65% |
| 1326 | s14 | REF | 60% |
| 1327 | s14 | REF | 65% |
| 1328 | s14 | SNP | 70% |
| 1329 | s14 | SNP | 70% |
| 1330 | s14 | REF | 65% |
| 1331 | s14 | REF | 55% |
| 1332 | s14 | SNP | 60% |
| 1333 | s14 | REF | 65% |
| 1334 | s14 | REF | 55% |
| 1335 | s14 | REF | 65% |
| 1336 | s14 | SNP | 70% |
| 1337 | s14 | REF | 60% |
| 1338 | s14 | REF | 60% |
| 1375 | s15 | REF | 70% |
| 1376 | s15 | SNP | 70% |
| 1377 | s15 | REF | 70% |
| 1378 | s15 | SNP | 70% |
| 1379 | s15 | REF | 75% |
| 1380 | s15 | SNP | 75% |
| 1381 | s15 | REF | 85% |
| 1382 | s15 | SNP | 85% |
| 1383 | s15 | REF | 80% |
| 1384 | s15 | SNP | 80% |
| 1385 | s15 | REF | 80% |
| 1386 | s15 | REF | 75% |
| 1387 | s15 | SNP | 75% |
| 1388 | s15 | REF | 70% |
| 1389 | s15 | SNP | 70% |
| 1390 | s15 | SNP | 80% |
| 1391 | s15 | SNP | 75% |
| 1392 | s15 | REF | 75% |
| 1393 | s15 | SNP | 80% |
| 1394 | s15 | REF | 80% |
| 1395 | s15 | SNP | 70% |
| 1396 | s15 | REF | 70% |
| 1397 | s16 | SNP | 55% |
| 1398 | s16 | REF | 60% |
| 1399 | s16 | REF | 60% |
| 1400 | s16 | SNP | 55% |
| 1401 | s16 | SNP | 40% |
| 1402 | s16 | REF | 45% |
| 1403 | s16 | SNP | 45% |
| 1404 | s16 | SNP | 55% |
| 1405 | s16 | REF | 60% |
| 1406 | s16 | SNP | 50% |
| 1407 | s16 | REF | 55% |
| 1408 | s16 | SNP | 60% |
| 1409 | s16 | REF | 65% |
| 1410 | s16 | REF | 65% |
| 1447 | s17 | REF | 65% |
| 1448 | s17 | SNP | 60% |
| 1449 | s17 | REF | 50% |
| 1450 | s17 | SNP | 60% |
| 1451 | s17 | REF | 65% |
| 1452 | s17 | REF | 65% |
| 1453 | s17 | SNP | 60% |
| 1454 | s17 | SNP | 45% |
| 1455 | s17 | SNP | 60% |
| 1456 | s17 | REF | 65% |
| 1457 | s18 | REF | 55% |
| 1458 | s18 | SNP | 50% |
| 1459 | s18 | REF | 55% |
| 1460 | s18 | SNP | 50% |
| 1461 | s18 | REF | 55% |
| 1462 | s18 | SNP | 50% |
| 1463 | s18 | REF | 50% |
| 1464 | s18 | SNP | 45% |
| 1465 | s18 | SNP | 45% |
| 1466 | s18 | REF | 50% |
| 1467 | s18 | SNP | 45% |
| 1468 | s18 | SNP | 50% |
| 1469 | s18 | REF | 55% |
| 1470 | s18 | SNP | 45% |
| 1471 | s18 | REF | 55% |
| 1472 | s18 | SNP | 50% |
| 1473 | s18 | REF | 55% |
| 1474 | s18 | SNP | 50% |
| 1475 | s18 | REF | 50% |
| 1476 | s18 | SNP | 45% |
| 1477 | s18 | REF | 50% |
| 1478 | s18 | REF | 55% |
| 1479 | s18 | SNP | 50% |
| 1480 | s18 | REF | 55% |
| 1481 | s18 | SNP | 50% |
| 1482 | s18 | REF | 50% |
| 1519 | s21 | SNP | 65% |
| 1520 | s21 | SNP | 70% |
| 1521 | s21 | SNP | 70% |
| 1522 | s21 | SNP | 70% |
| 1523 | s21 | SNP | 75% |
| 1524 | s21 | SNP | 75% |
| 1525 | s21 | SNP | 65% |
| 1526 | s21 | SNP | 70% |
| 1527 | s23 | REF | 50% |
| 1528 | s23 | SNP | 55% |
| 1529 | s23 | SNP | 50% |
| 1530 | s23 | REF | 45% |
| 1531 | s23 | REF | 45% |
| 1532 | s23 | SNP | 50% |
| 1533 | s23 | SNP | 60% |
| 1534 | s23 | REF | 55% |
| 1535 | s23 | REF | 50% |
| 1536 | s23 | SNP | 55% |
| 1537 | s23 | REF | 55% |
| 1538 | s23 | SNP | 60% |
| 1539 | s23 | SNP | 55% |
| 1540 | s23 | SNP | 65% |
| 1541 | s23 | REF | 60% |
| 1542 | s23 | REF | 50% |
| 1543 | s23 | SNP | 55% |
| 1544 | s23 | SNP | 60% |
| 1545 | s23 | REF | 55% |
| 1546 | s23 | SNP | 55% |
| 1547 | s23 | REF | 50% |
| 1548 | s23 | REF | 60% |
| 1549 | s23 | SNP | 65% |
| 1550 | s23 | SNP | 55% |
| 1551 | s23 | REF | 50% |
| 1552 | s23 | REF | 55% |
| 1553 | s23 | SNP | 60% |
| 1554 | s23 | SNP | 60% |
| 1591 | s25 | SNP | 45% |
| 1592 | s25 | REF | 50% |
| 1593 | s25 | REF | 60% |
| 1594 | s25 | SNP | 55% |
| 1595 | s25 | SNP | 50% |
| 1596 | s25 | REF | 55% |
| 1597 | s25 | REF | 65% |
| 1598 | s25 | SNP | 60% |
| 1599 | s25 | SNP | 55% |
| 1600 | s25 | REF | 60% |
| 1601 | s25 | REF | 60% |
| 1602 | s25 | SNP | 55% |
| 1603 | s25 | REF | 60% |
| 1604 | s25 | SNP | 55% |
| 1605 | s26 | SNP | 45% |
| 1606 | s26 | REF | 50% |
| 1607 | s26 | REF | 55% |
| 1608 | s26 | SNP | 50% |
| 1609 | s26 | REF | 50% |
| 1610 | s26 | SNP | 45% |
| 1611 | s26 | SNP | 45% |
| 1612 | s26 | REF | 50% |
| 1613 | s26 | REF | 40% |
| 1614 | s26 | SNP | 35% |
| 1615 | s26 | SNP | 60% |
| 1616 | s26 | REF | 60% |
| 1617 | s26 | SNP | 55% |
| 1618 | s26 | REF | 65% |
| 1619 | s26 | SNP | 60% |
| 1620 | s26 | REF | 50% |
| 1621 | s26 | SNP | 45% |
| 1622 | s26 | REF | 65% |
| 1623 | s26 | SNP | 60% |
| 1624 | s26 | SNP | 65% |
| 1625 | s26 | REF | 70% |
| 1626 | s26 | SNP | 60% |
| 1663 | s28 | SNP | 65% |
| 1664 | s28 | REF | 60% |
| 1665 | s28 | REF | 65% |
| 1666 | s28 | SNP | 70% |
| 1667 | s28 | REF | 60% |
| 1668 | s28 | SNP | 65% |
| 1669 | s28 | REF | 55% |
| 1670 | s28 | SNP | 60% |
| 1671 | s28 | SNP | 70% |
| 1672 | s28 | REF | 65% |
| 1673 | s28 | REF | 55% |
| 1674 | s28 | SNP | 60% |
| 1675 | s28 | SNP | 55% |
| 1676 | s28 | REF | 50% |
| 1677 | s28 | SNP | 65% |
| 1678 | s28 | REF | 60% |
| 1679 | s28 | SNP | 60% |
| 1680 | s28 | REF | 65% |
| 1681 | s28 | SNP | 70% |
| 1682 | s28 | SNP | 70% |
| 1683 | s28 | REF | 65% |
| 1684 | s28 | REF | 60% |
| 1685 | s28 | SNP | 65% |
| 1686 | s28 | REF | 55% |
| 1687 | s28 | SNP | 55% |
| 1688 | s28 | SNP | 55% |
| 1689 | s28 | SNP | 60% |
| 1690 | s28 | REF | 55% |
| 1691 | s83 | SNP | 45% |
| 1692 | s83 | SNP | 50% |
| 1693 | s83 | SNP | 40% |
| 1694 | s83 | SNP | 45% |
| 1695 | s83 | SNP | 45% |
| 1696 | s83 | SNP | 50% |
| 1697 | s83 | SNP | 50% |
| 1698 | s29 | SNP | 50% |
| 1735 | s30 | SNP | 75% |
| 1736 | s30 | SNP | 65% |
| 1737 | s30 | SNP | 60% |
| 1738 | s30 | SNP | 65% |
| 1739 | s30 | SNP | 65% |
| 1740 | s30 | SNP | 70% |
| 1741 | s30 | REF | 65% |
| 1742 | s30 | SNP | 65% |
| 1743 | s30 | SNP | 60% |
| 1744 | s30 | SNP | 65% |
| 1745 | s30 | REF | 60% |
| 1746 | s30 | SNP | 65% |
| 1747 | s31 | REF | 35% |
| 1748 | s31 | SNP | 35% |
| 1749 | s31 | REF | 50% |
| 1750 | s31 | SNP | 50% |
| 1751 | s31 | SNP | 40% |
| 1752 | s31 | REF | 40% |
| 1753 | s31 | REF | 70% |
| 1754 | s31 | REF | 55% |
| 1755 | s31 | SNP | 55% |
| 1756 | s31 | SNP | 40% |
| 1757 | s31 | REF | 40% |
| 1758 | s31 | REF | 40% |
| 1759 | s31 | SNP | 40% |
| 1760 | s31 | SNP | 70% |
| 1761 | s31 | SNP | 50% |
| 1762 | s31 | REF | 50% |
| 1763 | s31 | SNP | 55% |
| 1764 | s31 | REF | 55% |
| 1765 | s31 | SNP | 50% |
| 1766 | s31 | REF | 50% |
| 1767 | s31 | SNP | 70% |
| 1768 | s31 | REF | 70% |
| 1769 | s31 | REF | 60% |
| 1770 | s31 | SNP | 60% |
| 1807 | s32 | REF | 65% |
| 1808 | s32 | SNP | 70% |
| 1809 | s32 | REF | 55% |
| 1810 | s32 | SNP | 60% |
| 1811 | s32 | REF | 50% |
| 1812 | s32 | SNP | 55% |
| 1813 | s32 | SNP | 55% |
| 1814 | s32 | REF | 50% |
| 1815 | s32 | SNP | 55% |
| 1816 | s32 | REF | 50% |
| 1817 | s32 | SNP | 55% |
| 1818 | s32 | SNP | 55% |
| 1819 | s32 | REF | 50% |
| 1820 | s32 | SNP | 60% |
| 1821 | s32 | REF | 55% |
| 1822 | s33 | REF | 65% |
| 1823 | s33 | SNP | 60% |
| 1824 | s33 | REF | 65% |
| 1825 | s33 | SNP | 60% |
| 1826 | s33 | REF | 65% |
| 1827 | s33 | SNP | 60% |
| 1828 | s33 | REF | 70% |
| 1829 | s33 | SNP | 65% |
| 1830 | s33 | REF | 70% |
| 1831 | s33 | SNP | 65% |
| 1832 | s33 | REF | 70% |
| 1833 | s33 | SNP | 65% |
| 1834 | s33 | REF | 60% |
| 1835 | s33 | SNP | 65% |
| 1836 | s33 | REF | 70% |
| 1837 | s33 | SNP | 60% |
| 1838 | s33 | REF | 65% |
| 1839 | s33 | SNP | 55% |
| 1840 | s34 | SNP | 65% |
| 1841 | s34 | SNP | 60% |
| 1842 | s34 | REF | 65% |
| 1879 | s36 | SNP | 45% |
| 1880 | s36 | REF | 35% |
| 1881 | s36 | SNP | 40% |
| 1882 | s36 | SNP | 40% |
| 1883 | s36 | REF | 50% |
| 1884 | s36 | SNP | 55% |
| 1885 | s36 | REF | 35% |
| 1886 | s36 | SNP | 40% |
| 1887 | s36 | REF | 35% |
| 1888 | s36 | SNP | 40% |
| 1889 | s36 | REF | 40% |
| 1890 | s36 | SNP | 45% |
| 1891 | s36 | SNP | 55% |
| 1892 | s36 | REF | 50% |
| 1893 | s36 | SNP | 40% |
| 1894 | s36 | REF | 35% |
| 1895 | s36 | REF | 35% |
| 1896 | s36 | REF | 40% |
| 1897 | s36 | SNP | 45% |
| 1898 | s36 | SNP | 45% |
| 1899 | s36 | REF | 40% |
| 1900 | s36 | SNP | 45% |
| 1901 | s36 | REF | 40% |
| 1902 | s36 | REF | 50% |
| 1903 | s36 | SNP | 55% |
| 1904 | s36 | SNP | 55% |
| 1905 | s36 | REF | 50% |
| 1906 | s36 | SNP | 45% |
| 1907 | s36 | REF | 40% |
| 1908 | s37 | SNP | 50% |
| 1909 | s37 | REF | 55% |
| 1910 | s37 | SNP | 55% |
| 1911 | s37 | REF | 60% |
| 1912 | s37 | REF | 60% |
| 1913 | s37 | SNP | 55% |
| 1914 | s37 | REF | 70% |
| 1951 | s38 | REF | 50% |
| 1952 | s38 | SNP | 45% |
| 1953 | s38 | SNP | 50% |
| 1954 | s38 | REF | 55% |
| 1955 | s38 | SNP | 50% |
| 1956 | s38 | REF | 55% |
| 1957 | s38 | REF | 55% |
| 1958 | s38 | SNP | 50% |
| 1959 | s38 | REF | 55% |
| 1960 | s38 | SNP | 50% |
| 1961 | s39 | REF | 40% |
| 1962 | s39 | SNP | 45% |
| 1963 | s39 | REF | 40% |
| 1964 | s39 | SNP | 45% |
| 1965 | s39 | REF | 40% |
| 1966 | s39 | SNP | 45% |
| 1967 | s39 | SNP | 30% |
| 1968 | s39 | SNP | 30% |
| 1969 | s39 | SNP | 30% |
| 1970 | s39 | SNP | 45% |
| 1971 | s39 | REF | 40% |
| 1972 | s39 | REF | 40% |
| 1973 | s39 | SNP | 45% |
| 1974 | s39 | REF | 30% |
| 1975 | s39 | SNP | 35% |
| 1976 | s39 | SNP | 30% |
| 1977 | s39 | REF | 30% |
| 1978 | s39 | SNP | 35% |
| 1979 | s39 | SNP | 35% |
| 1980 | s39 | REF | 30% |
| 1981 | s39 | SNP | 30% |
| 1982 | s40 | SNP | 45% |
| 1983 | s40 | SNP | 35% |
| 1984 | s40 | REF | 40% |
| 1985 | s40 | SNP | 45% |
| 1986 | s40 | REF | 50% |
| 2023 | s41 | SNP | 70% |
| 2024 | s41 | REF | 60% |
| 2025 | s41 | REF | 65% |
| 2026 | s41 | SNP | 65% |
| 2027 | s41 | REF | 65% |
| 2028 | s41 | SNP | 60% |
| 2029 | s41 | REF | 65% |
| 2030 | s41 | SNP | 65% |
| 2031 | s41 | REF | 60% |
| 2032 | s41 | REF | 65% |
| 2033 | s41 | REF | 60% |
| 2034 | s41 | REF | 65% |
| 2035 | s41 | REF | 65% |
| 2036 | s41 | REF | 65% |
| 2037 | s41 | SNP | 65% |
| 2038 | s41 | SNP | 65% |
| 2039 | s41 | REF | 65% |
| 2040 | s41 | REF | 65% |
| 2041 | s41 | SNP | 65% |
| 2042 | s41 | REF | 70% |
| 2043 | s41 | REF | 60% |
| 2044 | s41 | REF | 65% |
| 2045 | s41 | SNP | 65% |
| 2046 | s41 | REF | 65% |
| 2047 | s41 | SNP | 60% |
| 2048 | s41 | REF | 60% |
| 2049 | s41 | SNP | 60% |
| 2050 | s41 | REF | 60% |
| 2051 | s41 | REF | 60% |
| 2052 | s41 | SNP | 60% |
| 2053 | s41 | REF | 60% |
| 2054 | s42 | REF | 70% |
| 2055 | s42 | SNP | 65% |
| 2056 | s42 | SNP | 45% |
| 2057 | s42 | REF | 50% |
| 2058 | s42 | REF | 55% |
| 2095 | s43 | REF | 70% |
| 2096 | s43 | SNP | 65% |
| 2097 | s43 | REF | 75% |
| 2098 | s43 | SNP | 70% |
| 2099 | s43 | SNP | 70% |
| 2100 | s43 | REF | 70% |
| 2101 | s43 | SNP | 65% |
| 2102 | s43 | SNP | 50% |
| 2103 | s43 | REF | 75% |
| 2104 | s43 | SNP | 70% |
| 2105 | s43 | SNP | 70% |
| 2106 | s43 | REF | 75% |
| 2107 | s43 | REF | 75% |
| 2108 | s43 | SNP | 70% |
| 2109 | s43 | REF | 65% |
| 2110 | s43 | SNP | 60% |
| 2111 | s46 | SNP | 45% |
| 2112 | s46 | REF | 45% |
| 2113 | s46 | REF | 40% |
| 2114 | s46 | SNP | 40% |
| 2115 | s46 | REF | 50% |
| 2116 | s46 | SNP | 50% |
| 2117 | s46 | REF | 35% |
| 2118 | s46 | SNP | 35% |
| 2119 | s46 | REF | 45% |
| 2120 | s46 | SNP | 45% |
| 2121 | s46 | SNP | 50% |
| 2122 | s46 | SNP | 45% |
| 2123 | s46 | SNP | 50% |
| 2124 | s46 | REF | 50% |
| 2125 | s46 | SNP | 50% |
| 2126 | s46 | SNP | 45% |
| 2127 | s46 | REF | 45% |
| 2128 | s46 | SNP | 50% |
| 2129 | s46 | REF | 50% |
| 2130 | s46 | REF | 50% |
| 2167 | s48 | SNP | 60% |
| 2168 | s48 | SNP | 65% |
| 2169 | s48 | SNP | 60% |
| 2170 | s49 | SNP | 45% |
| 2171 | s49 | SNP | 55% |
| 2172 | s49 | SNP | 45% |
| 2173 | s50 | REF | 60% |
| 2174 | s50 | SNP | 55% |
| 2175 | s50 | REF | 60% |
| 2176 | s50 | SNP | 55% |
| 2177 | s50 | SNP | 55% |
| 2178 | s50 | REF | 60% |
| 2179 | s50 | REF | 60% |
| 2180 | s50 | SNP | 55% |
| 2181 | s50 | REF | 60% |
| 2182 | s50 | SNP | 55% |
| 2183 | s51 | REF | 65% |
| 2184 | s51 | REF | 50% |
| 2185 | s52 | REF | 60% |
| 2186 | s52 | SNP | 55% |
| 2187 | s52 | REF | 80% |
| 2188 | s52 | SNP | 75% |
| 2189 | s52 | SNP | 45% |
| 2190 | s52 | REF | 75% |
| 2191 | s52 | SNP | 70% |
| 2192 | s52 | REF | 70% |
| 2193 | s52 | REF | 50% |
| 2194 | s52 | SNP | 45% |
| 2195 | s52 | REF | 50% |
| 2196 | s52 | REF | 60% |
| 2197 | s52 | SNP | 55% |
| 2198 | s52 | SNP | 55% |
| 2199 | s52 | REF | 60% |
| 2200 | s52 | REF | 60% |
| 2201 | s52 | SNP | 55% |
| 2202 | s52 | SNP | 50% |
| 2239 | s53 | REF | 50% |
| 2240 | s53 | SNP | 50% |
| 2241 | s53 | REF | 45% |
| 2242 | s53 | SNP | 45% |
| 2243 | s53 | SNP | 30% |
| 2244 | s53 | REF | 30% |
| 2245 | s53 | REF | 55% |
| 2246 | s53 | SNP | 40% |
| 2247 | s53 | REF | 40% |
| 2248 | s53 | SNP | 50% |
| 2249 | s53 | REF | 50% |
| 2250 | s53 | SNP | 55% |
| 2251 | s53 | SNP | 35% |
| 2252 | s53 | REF | 35% |
| 2253 | s54 | REF | 50% |
| 2254 | s54 | SNP | 55% |
| 2255 | s54 | REF | 40% |
| 2256 | s54 | SNP | 45% |
| 2257 | s54 | REF | 55% |
| 2258 | s54 | SNP | 45% |
| 2259 | s54 | REF | 40% |
| 2260 | s54 | SNP | 60% |
| 2261 | s54 | REF | 55% |
| 2262 | s54 | SNP | 60% |
| 2263 | s54 | REF | 55% |
| 2264 | s54 | SNP | 60% |
| 2265 | s54 | SNP | 45% |
| 2266 | s54 | SNP | 45% |
| 2267 | s54 | REF | 40% |
| 2268 | s54 | SNP | 45% |
| 2269 | s54 | REF | 40% |
| 2270 | s54 | REF | 50% |
| 2271 | s54 | SNP | 55% |
| 2272 | s54 | SNP | 55% |
| 2273 | s54 | REF | 50% |
| 2274 | s54 | REF | 40% |
| 2311 | s55 | SNP | 40% |
| 2312 | s55 | REF | 45% |
| 2313 | s55 | SNP | 45% |
| 2314 | s55 | REF | 50% |
| 2315 | s56 | REF | 50% |
| 2316 | s56 | SNP | 45% |
| 2317 | s56 | SNP | 30% |
| 2318 | s56 | SNP | 35% |
| 2319 | s56 | REF | 40% |
| 2320 | s56 | REF | 35% |
| 2321 | s56 | REF | 35% |
| 2322 | s56 | SNP | 30% |
| 2323 | s56 | SNP | 50% |
| 2324 | s56 | REF | 55% |
| 2325 | s56 | SNP | 30% |
| 2326 | s56 | SNP | 45% |
| 2327 | s56 | REF | 50% |
| 2328 | s56 | REF | 55% |
| 2329 | s56 | REF | 35% |
| 2330 | s56 | SNP | 45% |
| 2331 | s56 | REF | 50% |
| 2332 | s56 | SNP | 35% |
| 2333 | s56 | REF | 40% |
| 2334 | s56 | REF | 35% |
| 2335 | s56 | SNP | 30% |
| 2336 | s56 | SNP | 50% |
| 2337 | s56 | REF | 55% |
| 2338 | s56 | REF | 45% |
| 2339 | s56 | SNP | 40% |
| 2340 | s56 | SNP | 50% |
| 2341 | s56 | REF | 40% |
| 2342 | s56 | SNP | 35% |
| 2343 | s57 | REF | 30% |
| 2344 | s57 | REF | 30% |
| 2345 | s57 | REF | 30% |
| 2346 | s57 | REF | 35% |
| 2383 | s58 | REF | 55% |
| 2384 | s58 | SNP | 50% |
| 2385 | s58 | REF | 55% |
| 2386 | s58 | SNP | 50% |
| 2387 | s58 | SNP | 45% |
| 2388 | s58 | REF | 50% |
| 2389 | s58 | SNP | 50% |
| 2390 | s58 | REF | 55% |
| 2391 | s58 | REF | 50% |
| 2392 | s58 | SNP | 45% |
| 2393 | s58 | REF | 45% |
| 2394 | s58 | SNP | 40% |
| 2395 | s58 | SNP | 50% |
| 2396 | s58 | REF | 55% |
| 2397 | s58 | REF | 50% |
| 2398 | s58 | SNP | 45% |
| 2399 | s58 | REF | 50% |
| 2400 | s58 | SNP | 45% |
| 2401 | s58 | SNP | 45% |
| 2402 | s58 | SNP | 45% |
| 2403 | s59 | REF | 50% |
| 2404 | s59 | SNP | 55% |
| 2405 | s59 | SNP | 55% |
| 2406 | s59 | SNP | 55% |
| 2407 | s59 | REF | 50% |
| 2408 | s59 | REF | 50% |
| 2409 | s59 | SNP | 55% |
| 2410 | s59 | SNP | 55% |
| 2411 | s59 | REF | 50% |
| 2412 | s59 | SNP | 55% |
| 2413 | s60 | SNP | 60% |
| 2414 | s60 | REF | 65% |
| 2415 | s60 | SNP | 60% |
| 2416 | s60 | REF | 65% |
| 2417 | s60 | REF | 65% |
| 2418 | s60 | SNP | 60% |
| 2455 | s61 | SNP | 60% |
| 2456 | s61 | SNP | 60% |
| 2457 | s61 | SNP | 60% |
| 2458 | s61 | SNP | 70% |
| 2459 | s61 | REF | 65% |
| 2460 | s61 | REF | 70% |
| 2461 | s61 | REF | 70% |
| 2462 | s61 | SNP | 70% |
| 2463 | s61 | REF | 60% |
| 2464 | s61 | REF | 65% |
| 2465 | s61 | REF | 55% |
| 2466 | s61 | SNP | 55% |
| 2467 | s61 | SNP | 65% |
| 2468 | s61 | SNP | 70% |
| 2469 | s62 | SNP | 50% |
| 2470 | s62 | REF | 50% |
| 2471 | s62 | REF | 45% |
| 2472 | s62 | SNP | 45% |
| 2473 | s62 | REF | 50% |
| 2474 | s62 | REF | 50% |
| 2475 | s62 | SNP | 45% |
| 2476 | s62 | SNP | 45% |
| 2477 | s62 | REF | 55% |
| 2478 | s62 | REF | 45% |
| 2479 | s62 | REF | 55% |
| 2480 | s62 | REF | 50% |
| 2481 | s62 | SNP | 50% |
| 2482 | s62 | SNP | 50% |
| 2483 | s62 | REF | 55% |
| 2484 | s62 | REF | 50% |
| 2485 | s62 | REF | 55% |
| 2486 | s62 | SNP | 55% |
| 2487 | s62 | REF | 55% |
| 2488 | s62 | SNP | 55% |
| 2489 | s62 | SNP | 50% |
| 2490 | s62 | REF | 50% |
| 2527 | s63 | SNP | 50% |
| 2528 | s63 | REF | 55% |
| 2529 | s64 | REF | 60% |
| 2530 | s64 | SNP | 55% |
| 2531 | s64 | SNP | 45% |
| 2532 | s64 | REF | 50% |
| 2533 | s64 | REF | 55% |
| 2534 | s64 | SNP | 50% |
| 2535 | s64 | SNP | 55% |
| 2536 | s64 | REF | 60% |
| 2537 | s64 | REF | 50% |
| 2538 | s64 | SNP | 45% |
| 2539 | s64 | SNP | 40% |
| 2540 | s64 | REF | 45% |
| 2541 | s65 | REF | 45% |
| 2542 | s65 | SNP | 50% |
| 2543 | s65 | SNP | 50% |
| 2544 | s65 | REF | 45% |
| 2545 | s65 | REF | 45% |
| 2546 | s65 | SNP | 50% |
| 2547 | s65 | SNP | 50% |
| 2548 | s65 | REF | 45% |
| 2549 | s65 | REF | 45% |
| 2550 | s65 | SNP | 50% |
| 2551 | s65 | REF | 50% |
| 2552 | s65 | SNP | 55% |
| 2553 | s65 | SNP | 50% |
| 2554 | s65 | REF | 50% |
| 2555 | s65 | SNP | 55% |
| 2556 | s65 | REF | 55% |
| 2557 | s65 | SNP | 60% |
| 2558 | s65 | SNP | 60% |
| 2559 | s65 | REF | 55% |
| 2560 | s65 | SNP | 55% |
| 2561 | s65 | REF | 50% |
| 2562 | s65 | REF | 45% |
| 2599 | s86 | SNP | 30% |
| 2600 | s66 | SNP | 65% |
| 2601 | s66 | REF | 70% |
| 2602 | s66 | REF | 75% |
| 2603 | s66 | SNP | 70% |
| 2604 | s66 | SNP | 60% |
| 2605 | s66 | REF | 65% |
| 2606 | s66 | SNP | 60% |
| 2607 | s66 | REF | 65% |
| 2608 | s66 | REF | 60% |
| 2609 | s66 | SNP | 55% |
| 2610 | s66 | SNP | 60% |
| 2611 | s66 | REF | 65% |
| 2612 | s66 | REF | 80% |
| 2613 | s66 | SNP | 75% |
| 2614 | s66 | REF | 70% |
| 2615 | s66 | SNP | 65% |
| 2616 | s66 | SNP | 55% |
| 2617 | s66 | REF | 60% |
| 2618 | s66 | REF | 60% |
| 2619 | s66 | SNP | 55% |
| 2620 | s66 | SNP | 70% |
| 2621 | s66 | REF | 75% |
| 2622 | s66 | SNP | 55% |
| 2623 | s66 | REF | 60% |
| 2624 | s67 | REF | 35% |
| 2625 | s67 | SNP | 40% |
| 2626 | s67 | SNP | 50% |
| 2627 | s67 | REF | 45% |
| 2628 | s67 | REF | 40% |
| 2629 | s67 | SNP | 35% |
| 2630 | s67 | REF | 30% |
| 2631 | s67 | SNP | 45% |
| 2632 | s67 | REF | 30% |
| 2633 | s67 | SNP | 35% |
| 2634 | s67 | REF | 40% |
| 2671 | s68 | SNP | 50% |
| 2672 | s68 | REF | 55% |
| 2673 | s68 | REF | 55% |
| 2674 | s68 | SNP | 50% |
| 2675 | s68 | REF | 50% |
| 2676 | s68 | SNP | 55% |
| 2677 | s68 | REF | 60% |
| 2678 | s68 | REF | 50% |
| 2679 | s68 | SNP | 45% |
| 2680 | s68 | REF | 60% |
| 2681 | s68 | SNP | 55% |
| 2682 | s68 | REF | 55% |
| 2683 | s68 | SNP | 45% |
| 2684 | s68 | REF | 50% |
| 2685 | s68 | REF | 50% |
| 2686 | s68 | SNP | 45% |
| 2687 | s68 | REF | 50% |
| 2688 | s68 | SNP | 45% |
| 2689 | s68 | REF | 50% |
| 2690 | s68 | SNP | 45% |
| 2691 | s68 | SNP | 50% |
| 2692 | s69 | SNP | 70% |
| 2693 | s69 | REF | 75% |
| 2694 | s69 | SNP | 70% |
| 2695 | s69 | SNP | 70% |
| 2696 | s69 | REF | 75% |
| 2697 | s69 | REF | 75% |
| 2698 | s69 | SNP | 70% |
| 2699 | s69 | REF | 75% |
| 2700 | s69 | SNP | 70% |
| 2701 | s69 | REF | 75% |
| 2702 | s69 | REF | 70% |
| 2703 | s69 | SNP | 65% |
| 2704 | s69 | REF | 70% |
| 2705 | s69 | REF | 75% |
| 2706 | s69 | SNP | 70% |
| 2743 | s71 | SNP | 75% |
| 2744 | s71 | REF | 70% |
| 2745 | s71 | SNP | 70% |
| 2746 | s71 | REF | 75% |
| 2747 | s71 | SNP | 75% |
| 2748 | s71 | SNP | 80% |
| 2749 | s71 | REF | 80% |
| 2750 | s71 | SNP | 75% |
| 2751 | s71 | REF | 75% |
| 2752 | s71 | SNP | 85% |
| 2753 | s71 | REF | 85% |
| 2754 | s71 | REF | 75% |
| 2755 | s71 | SNP | 75% |
| 2756 | s71 | SNP | 70% |
| 2757 | s71 | REF | 70% |
| 2758 | s71 | REF | 75% |
| 2759 | s71 | SNP | 75% |
| 2760 | s71 | REF | 70% |
| 2761 | s71 | SNP | 70% |
| 2762 | s72 | SNP | 35% |
| 2763 | s72 | REF | 40% |
| 2764 | s72 | SNP | 35% |
| 2765 | s72 | REF | 45% |
| 2766 | s72 | SNP | 40% |
| 2767 | s72 | SNP | 40% |
| 2768 | s72 | REF | 45% |
| 2769 | s72 | SNP | 45% |
| 2770 | s72 | REF | 50% |
| 2771 | s72 | SNP | 40% |
| 2772 | s72 | REF | 45% |
| 2773 | s72 | SNP | 45% |
| 2774 | s72 | REF | 50% |
| 2775 | s72 | SNP | 40% |
| 2776 | s72 | REF | 45% |
| 2777 | s72 | REF | 50% |
| 2778 | s72 | REF | 45% |
| 2815 | s73 | SNP | 55% |
| 2816 | s73 | REF | 60% |
| 2817 | s73 | SNP | 55% |
| 2818 | s73 | REF | 60% |
| 2819 | s73 | SNP | 50% |
| 2820 | s73 | REF | 55% |
| 2821 | s73 | REF | 55% |
| 2822 | s73 | SNP | 50% |
| 2823 | s73 | REF | 60% |
| 2824 | s73 | SNP | 55% |
| 2825 | s73 | REF | 55% |
| 2826 | s73 | SNP | 50% |
| 2827 | s73 | SNP | 45% |
| 2828 | s73 | REF | 50% |
| 2829 | s73 | SNP | 50% |
| 2830 | s74 | SNP | 40% |
| 2831 | s74 | REF | 45% |
| 2832 | s74 | SNP | 35% |
| 2833 | s74 | REF | 40% |
| 2834 | s74 | REF | 50% |
| 2835 | s74 | SNP | 45% |
| 2836 | s74 | REF | 55% |
| 2837 | s74 | SNP | 50% |
| 2838 | s74 | SNP | 40% |
| 2839 | s74 | REF | 45% |
| 2840 | s74 | SNP | 45% |
| 2841 | s74 | REF | 50% |
| 2842 | s74 | REF | 45% |
| 2843 | s74 | SNP | 45% |
| 2844 | s74 | REF | 50% |
| 2845 | s74 | SNP | 40% |
| 2846 | s74 | SNP | 40% |
| 2847 | s74 | REF | 45% |
| 2848 | s74 | REF | 40% |
| 2849 | s74 | SNP | 35% |
| 2850 | s74 | SNP | 35% |
| 2887 | s75 | SNP | 45% |
| 2888 | s75 | SNP | 30% |
| 2889 | s87 | SNP | 60% |
| 2890 | s87 | SNP | 65% |
| 2891 | s87 | SNP | 65% |
| 2892 | s87 | SNP | 60% |
| 2893 | s87 | SNP | 65% |
| 2894 | s87 | SNP | 65% |
| 2895 | s87 | SNP | 70% |
| 2896 | s87 | SNP | 60% |
| 2897 | s87 | REF | 55% |
| 2898 | s87 | SNP | 65% |
| 2899 | s87 | REF | 45% |
| 2900 | s87 | SNP | 50% |
| 2901 | s87 | SNP | 65% |
| 2902 | s87 | SNP | 65% |
| 2903 | s87 | SNP | 65% |
| 2904 | s87 | SNP | 50% |
| 2905 | s76 | SNP | 45% |
| 2906 | s76 | SNP | 45% |
| 2907 | s76 | REF | 50% |
| 2908 | s76 | SNP | 50% |
| 2909 | s76 | REF | 55% |
| 2910 | s76 | SNP | 45% |
| 2911 | s76 | REF | 50% |
| 2912 | s76 | SNP | 45% |
| 2913 | s76 | REF | 50% |
| 2914 | s76 | SNP | 45% |
| 2915 | s76 | REF | 50% |
| 2916 | s76 | REF | 50% |
| 2917 | s76 | SNP | 45% |
| 2918 | s76 | REF | 50% |
| 2919 | s76 | SNP | 45% |
| 2920 | s76 | REF | 50% |
| 2921 | s76 | REF | 55% |
| 2922 | s76 | SNP | 50% |
| 2959 | s77 | SNP | 75% |
| 2960 | s77 | REF | 80% |
| 2961 | s77 | SNP | 75% |
| 2962 | s77 | SNP | 50% |
| 2963 | s77 | REF | 55% |
| 2964 | s77 | REF | 55% |
| 2965 | s77 | SNP | 50% |
| 2966 | s77 | REF | 65% |
| 2967 | s77 | SNP | 60% |
| 2968 | s77 | REF | 80% |
| 2969 | s77 | SNP | 35% |
| 2970 | s77 | REF | 40% |
| 2971 | s77 | SNP | 65% |
| 2972 | s77 | REF | 70% |
| 2973 | s77 | SNP | 50% |
| 2974 | s77 | REF | 55% |
| 2975 | s78 | REF | 40% |
| 2976 | s78 | SNP | 30% |
| 2977 | s78 | SNP | 35% |
| 2978 | s78 | REF | 35% |
| 2979 | s78 | SNP | 40% |
| 2980 | s78 | REF | 45% |
| 2981 | s78 | REF | 45% |
| 2982 | s78 | SNP | 40% |
| 2983 | s78 | SNP | 35% |
| 2984 | s78 | REF | 40% |
| 2985 | s78 | SNP | 40% |
| 2986 | s78 | REF | 45% |
| 2987 | s78 | REF | 35% |
| 2988 | s78 | SNP | 30% |
| 2989 | s78 | SNP | 40% |
| 2990 | s78 | REF | 45% |
| 2991 | s78 | REF | 45% |
| 2992 | s78 | SNP | 40% |
| 2993 | s78 | REF | 45% |
| 2994 | s78 | SNP | 45% |
| 2995 | s78 | REF | 50% |
| 2996 | s78 | SNP | 40% |
| 2997 | s78 | REF | 45% |
| 2998 | s78 | REF | 50% |
| 2999 | s78 | SNP | 35% |
| 3000 | s78 | SNP | 45% |
| 3001 | s78 | REF | 40% |
| 3002 | s78 | SNP | 40% |
| 3003 | s78 | REF | 45% |
| 3004 | s78 | REF | 40% |
| 3005 | s78 | SNP | 35% |
| 3006 | s78 | SNP | 30% |
| 3007 | s78 | SNP | 40% |
| 3008 | s78 | REF | 35% |
| 3009 | s78 | REF | 45% |
| 3010 | s78 | SNP | 40% |

[0155] Examples are provided below to facilitate a more complete understanding of the invention. The following examples illustrate the exemplary modes of making and practicing the invention. However, the scope of the invention is not limited to specific embodiments disclosed in these Examples, which are for purposes of illustration only.

### EXPERIMENTAL DETAILS

### Example 1: BEST1 Correction Anaylsis

[0156] Guide sequences comprising 17-20 nucleotides in the sequences of 17-20 contiguous nucleotides set forth in SEQ ID NOs: 1-3010 are screened for high on target activity. On target activity is determined by DNA capillary electrophoresis analysis.

[0157] According to DNA capillary electrophoresis analysis, guide sequences comprising 17-20 nucleotides in the sequences of 17-20 contiguous nucleotides set forth in SEQ ID NOs: 1-3010 are found to be suitable for correction of the BEST1 gene.

### Discussion

[0158] The guide sequences of the present invention are determined to be suitable for targeting the BEST1 gene.

[0159] REFERENCES
[0160] 1. Ahmad and Allen (1992) “Antibody-mediated Specific Binging and Cytotoxicity of Lipsome-entrapped Doxorubicin to Lung Cancer Cells in Vitro”, Cancer Research 52:4817-20
[0161] 2. Anders (1992) “Human gene therapy”, Science 256:808-13
[0162] 3. Basha et al. (2011) “Influence of Cationic Lipid Composition on Gene Silencing Properties of Lipid Nanoparticle Formulations of siRNA in Antigen-Presenting Cells”, Mol. Ther. 19(12):2186-200
[0163] 4. Behr (1994) Gene transfer with synthetic cationic amphiphiles: Prospects for gene therapy”, Bioconjuage Chem 5:382-89
[0164] 5. Blaese (1995) “Vectors in cancer therapy: how will they deliver”, Cancer Gene Ther. 2:291-97
[0165] 6. Blaese et al. (1995) “T lympocyte-directed gene therapy for ADA-SCID: initial trial results after 4 years”, Science 270(5235):475-80
[0166] 7. Buchschacher and Panganiban (1992) “Human immunodeficiency virus vectors for inducible expression of foreign genes”, J. Virol. 66:2731-39
[0167] 8. Burstein et al. (2017) “New CRISPR-Cas systems from uncultivated microbes”, Nature 542:237-41
[0168] 9. Chung et al. (2006) “Agrobacterium is not alone: gene transfer to plants by viruses and other bacteria”, Trends Plant Sci. 11 (1):1-4
[0169] 10. Coelho et al. (2013) “Safety and Efficacy of RNAi Therapy for Transthyretin Amyloidosis”, N Engl J. Med 369:819-29
[0170] 11. Crystal (1995) “Transfer of genes to humans: early lessons and obstacles to success”, Science 270(5235):404-10
[0171] 12. Dillon (1993) “Regulation gene expression in gene therapy” Trends in Biotechnology 11(5):167-173
[0172] 13. Dranoff et al. (1997) “A phase I study of vaccination with autologous, irradiated melanoma cells engineered to secrete human granulocyte macrophage colony stimulating factor”, Hum. Gene Ther. 8(1): 111-23
[0173] 14. Dunbar et al. (1995) “Retrovirally marked CD34-enriched peripheral blood and bone marrow cells contribute to long-term engraftment after autologous transplantation”, Blood 85:3048-57
[0174] 15. Ellem et al. (1997) “A case report: immune responses and clinical course of the first human use of ganulocyte/macrophage-colony-stimulating-factor-tranduced autologous melanoma cells for immunotherapy”, Cancer Immunol Immunother 44:10-20
[0175] 16. Gao and Huang (1995) “Cationic liposome-mediated gene transfer” Gene Ther. 2(10):710-22
[0176] 17. Haddada et al. (1995) “Gene Therapy Using Adenovirus Vectors”, in: The Molecular Repertoire of Adenoviruses III: Biology and Pathogenesis, ed. Doerfler and Böhm, pp. 297-306
[0177] 18. Han et al. (1995) “Ligand-directed retro-viral targeting of human breast cancer cells”, Proc Natl Acad Sci U.S.A. 92(21):9747-51
[0178] 19. Inaba et al. (1992) “Generation of large numbers of dendritic cells from mouse bone marrow cultures supplemented with granulocyte/macrophage colony-stimulating factor”, J Exp Med. 176(6): 1693-702
[0179] 20. Jinek et al. (2012) “A programmable dual-RNA-guided DNA endonuclease in adaptive bacterial immunity,” Science 337(6096):816-21
[0180] 21. Johan et al. (1992) “GLVR1, a receptor for gibbon ape leukemia virus, is homologous to a phosphate permease of Neurospora crassa and is expressed at high levels in the brain and thymus”, J Virol 66(3):1635-40
[0181] 22. Judge et al. (2006) “Design of noninflammatory synthetic siRNA mediating potent gene silencing in vivo”, Mol Ther. 13(3):494-505
[0182] 23. Kohn et al. (1995) “Engraftment of gene-modified umbilical cord blood cells in neonates with adnosine deaminase deficiency”, Nature Medicine 1:1017-23
[0183] 24. Kremer and Perricaudet (1995) “Adenovirus and adeno-associated virus mediated gene transfer”, Br. Med. Bull. 51(1):31-44
[0184] 25. Macdiarmid et al. (2009) “Sequential treatment of drug-resistant tumors with targeted minicells containing siRNA or a cytotoxic drug”, Nat Biotehcnol. 27(7):643-51
[0185] 26. Malech et al. (1997) “Prolonged production of NADPH oxidase-corrected granulocyes after gene therapy of chronic granulomatous disease”, PNAS 94(22):12133-38
[0186] 27. Miller et al. (1991) “Construction and properties of retrovirus packaging cells based on gibbon ape leukemia virus”, J Virol. 65(5):2220-24
[0187] 28. Miller (1992) “Human gene therapy comes of age”, Nature 357:455-60
[0188] 29. Mitani and Caskey (1993) “Delivering therapeutic genes - matching approach and application”, Trends in Biotechnology 11(5):162-66
[0189] 30. Nabel and Felgner (1993) “Direct gene transfer for immunotherapy and immunization”, Trends in Biotechnology 11(5):211-15
[0190] 31. Remy et al. (1994) “Gene Transfer with a Series of Lipphilic DNA-Binding Molecules”, Bioconjugate Chem. 5(6):647-54
[0191] 32. Sentmanat et al. (2018) “A Survey of Validation Strategies for CRISPR-Cas9 Editing”, Scientific Reports 8:888, doi:10.1038/s41598-018-19441-8
[0192] 33. Sommerfelt et al. (1990) “Localization of the receptor gene for type D simian retroviruses on human chromosome 19”, J. Virol. 64(12):6214-20
[0193] 34. Van Brunt (1988) “Molecular framing: transgenic animals as bioactors” Biotechnology 6:1149-54
[0194] 35. Vigne et al. (1995) “Third-generation adenovectors for gene therapy”, Restorative Neurology and Neuroscience 8(1,2): 35-36
[0195] 36. Wilson et al. (1989) “Formation of infectious hybrid virion with gibbon ape leukemia virus and human T-cell leukemia virus retroviral envelope glycoproteins and the gag and pol proteins of Moloney murine leukemia virus”, J. Virol. 63:2374-78
[0196] 37. Yu et al. (1994) “Progress towards gene therapy for HIV infection”, Gene Ther. 1(1):13-26
[0197] 38. Zetsche et al. (2015) “Cpf1 is a single RNA-guided endonuclease of a class 2 CRIPSR-Cas system” Cell 163(3):759-71
[0198] 39. Zuris et al. (2015) “Cationic lipid-mediated delivery of proteins enables efficient protein based genome editing in vitro and in vivo” Nat Biotechnol. 33(1):73-80

The application's sequence listing, which the Patent Office published only in electronic form, follows.

SEQUENCE LISTING (3010 sequences)

SEQ ID NO: 1 - RNA, 20 nt, Artificial Sequence
  synthesized
auccgucagguuaaacucca

SEQ ID NO: 2 - RNA, 20 nt, Artificial Sequence
  synthesized
ucucaagugaggaggaaaac

SEQ ID NO: 3 - RNA, 20 nt, Artificial Sequence
  synthesized
gccuccugaggagcugggug

SEQ ID NO: 4 - RNA, 20 nt, Artificial Sequence
  synthesized
agaggagcugaaaccuaccc

SEQ ID NO: 5 - RNA, 20 nt, Artificial Sequence
  synthesized
aggagcugaaaccuacccgg

SEQ ID NO: 6 - RNA, 20 nt, Artificial Sequence
  synthesized
agcagauuacaagaagggac

SEQ ID NO: 7 - RNA, 20 nt, Artificial Sequence
  synthesized
ccacaaaggaguccuugucu

SEQ ID NO: 8 - RNA, 20 nt, Artificial Sequence
  synthesized
cuccacaaaggaguccuugu

SEQ ID NO: 9 - RNA, 20 nt, Artificial Sequence
  synthesized
aguagcagagcaggaagauu

SEQ ID NO: 10 - RNA, 20 nt, Artificial Sequence
  synthesized
cugcagaguggagugaagaa

SEQ ID NO: 11 - RNA, 20 nt, Artificial Sequence
  synthesized
gcagaguggagugaagaagg

SEQ ID NO: 12 - RNA, 20 nt, Artificial Sequence
  synthesized
cugagggucuuccgagagcc

SEQ ID NO: 13 - RNA, 20 nt, Artificial Sequence
  synthesized
aacaugggaguggggcugag

SEQ ID NO: 14 - RNA, 20 nt, Artificial Sequence
  synthesized
agcaccccuguccagcuaug

SEQ ID NO: 15 - RNA, 20 nt, Artificial Sequence
  synthesized
caccccuguccagcuaugcc

SEQ ID NO: 16 - RNA, 20 nt, Artificial Sequence
  synthesized
agccugccggggcuggugga

SEQ ID NO: 17 - RNA, 20 nt, Artificial Sequence
  synthesized
guuuugaauugcucucagag

SEQ ID NO: 18 - RNA, 20 nt, Artificial Sequence
  synthesized
uuugaauugcucucagagag

SEQ ID NO: 19 - RNA, 20 nt, Artificial Sequence
  synthesized
gcugcuauuuccacacccca

SEQ ID NO: 20 - RNA, 20 nt, Artificial Sequence
  synthesized
ugaacuccugaccucaagua

SEQ ID NO: 21 - RNA, 20 nt, Artificial Sequence
  synthesized
uauuaaagagagguuggccg

SEQ ID NO: 22 - RNA, 20 nt, Artificial Sequence
  synthesized
gggugaagugagaaaagguc

SEQ ID NO: 23 - RNA, 20 nt, Artificial Sequence
  synthesized
gugaagugagaaaagguccc

SEQ ID NO: 24 - RNA, 20 nt, Artificial Sequence
  synthesized
agaccagggcuggaauuuag

SEQ ID NO: 25 - RNA, 20 nt, Artificial Sequence
  synthesized
ugagaccagggcuggaauuu

SEQ ID NO: 26 - RNA, 20 nt, Artificial Sequence
  synthesized
gaaggaaauggggaugagcu

SEQ ID NO: 27 - RNA, 20 nt, Artificial Sequence
  synthesized
cuuuuaaacaacugacccuu

SEQ ID NO: 28 - RNA, 20 nt, Artificial Sequence
  synthesized
aaggugcggacugcagccag

SEQ ID NO: 29 - RNA, 20 nt, Artificial Sequence
  synthesized
gaaaggugcggacugcagcc

SEQ ID NO: 30 - RNA, 20 nt, Artificial Sequence
  synthesized
auuggacccccaaaucuuga

SEQ ID NO: 31 - RNA, 20 nt, Artificial Sequence
  synthesized
caauuggacccccaaaucuu

SEQ ID NO: 32 - RNA, 20 nt, Artificial Sequence
  synthesized
ggaggaggaugugguagcaa

SEQ ID NO: 33 - RNA, 20 nt, Artificial Sequence
  synthesized
ggaugugguagcaaagggcu

SEQ ID NO: 34 - RNA, 20 nt, Artificial Sequence
  synthesized
gacucuuuuucagcaugcau

SEQ ID NO: 35 - RNA, 20 nt, Artificial Sequence
  synthesized
gcccuuugcuuuggcaggga

SEQ ID NO: 36 - RNA, 20 nt, Artificial Sequence
  synthesized
gaacugaacaacggcacuua

SEQ ID NO: 37 - RNA, 20 nt, Artificial Sequence
  synthesized
acuccguccuucagggauca

SEQ ID NO: 38 - RNA, 20 nt, Artificial Sequence
  synthesized
ccacccugagcucaggcagc

SEQ ID NO: 39 - RNA, 20 nt, Artificial Sequence
  synthesized
uacuccguccuucagggauc

SEQ ID NO: 40 - RNA, 20 nt, Artificial Sequence
  synthesized
aguugcuucagagagaugga

SEQ ID NO: 41 - RNA, 20 nt, Artificial Sequence
  synthesized
aaaggcaaaaauggugugug

SEQ ID NO: 42 - RNA, 20 nt, Artificial Sequence
  synthesized
aggcaaaaaugguguguggg

SEQ ID NO: 43 - RNA, 20 nt, Artificial Sequence
  synthesized
aauaauacaaugacaaaggc

SEQ ID NO: 44 - RNA, 20 nt, Artificial Sequence
  synthesized
ugugugucacagugacagga

SEQ ID NO: 45 - RNA, 20 nt, Artificial Sequence
  synthesized
ugugugugugucacagugac

SEQ ID NO: 46 - RNA, 20 nt, Artificial Sequence
  synthesized
ugugugugugugugucacag

SEQ ID NO: 47 - RNA, 20 nt, Artificial Sequence
  synthesized
ugugugugugugugugucac

SEQ ID NO: 48 - RNA, 20 nt, Artificial Sequence
  synthesized
cuggauguagcugucgcaau

SEQ ID NO: 49 - RNA, 20 nt, Artificial Sequence
  synthesized
ggauguagcugucgcaauac

SEQ ID NO: 50 - RNA, 20 nt, Artificial Sequence
  synthesized
gaccaaggaagcagcugggg

SEQ ID NO: 51 - RNA, 20 nt, Artificial Sequence
  synthesized
aggaccaaggaagcagcugg

SEQ ID NO: 52 - RNA, 20 nt, Artificial Sequence
  synthesized
aagcagcuggggugggaagg

SEQ ID NO: 53 - RNA, 20 nt, Artificial Sequence
  synthesized
ccaaggaagcagcuggggug

SEQ ID NO: 54 - RNA, 20 nt, Artificial Sequence
  synthesized
ggaagcagcuggggugggaa

SEQ ID NO: 55 - RNA, 20 nt, Artificial Sequence
  synthesized
ggggugggaagggcucaccu

SEQ ID NO: 56 - RNA, 20 nt, Artificial Sequence
  synthesized
ggugggaagggcucaccuag

SEQ ID NO: 57 - RNA, 20 nt, Artificial Sequence
  synthesized
gaaggaccaaggaagcagcu

SEQ ID NO: 58 - RNA, 20 nt, Artificial Sequence
  synthesized
cacauguaaucccagcacuu

SEQ ID NO: 59 - RNA, 20 nt, Artificial Sequence
  synthesized
gacauguacuggaauaagcc

SEQ ID NO: 60 - RNA, 20 nt, Artificial Sequence
  synthesized
uguguaggggggcuguggcu

SEQ ID NO: 61 - RNA, 20 nt, Artificial Sequence
  synthesized
agccucugggcucacuuucu

SEQ ID NO: 62 - RNA, 20 nt, Artificial Sequence
  synthesized
cugccuuuuggaaguagaaa

SEQ ID NO: 63 - RNA, 20 nt, Artificial Sequence
  synthesized
gccuuuuggaaguagaaacg

SEQ ID NO: 64 - RNA, 20 nt, Artificial Sequence
  synthesized
guuugggcaguauacuaagg

SEQ ID NO: 65 - RNA, 20 nt, Artificial Sequence
  synthesized
uugggcaguauacuaaggug

SEQ ID NO: 66 - RNA, 20 nt, Artificial Sequence
  synthesized
cuauguuuucugauaagcua

SEQ ID NO: 67 - RNA, 20 nt, Artificial Sequence
  synthesized
acugggagugacauccacaa

SEQ ID NO: 68 - RNA, 20 nt, Artificial Sequence
  synthesized
ugggagugacauccacaaag

SEQ ID NO: 69 - RNA, 20 nt, Artificial Sequence
  synthesized
aaugcaccauuugguagcua

SEQ ID NO: 70 - RNA, 20 nt, Artificial Sequence
  synthesized
ugcaccauuugguagcuaug

SEQ ID NO: 71 - RNA, 20 nt, Artificial Sequence
  synthesized
ugugguuggucaagugcagu

SEQ ID NO: 72 - RNA, 20 nt, Artificial Sequence
  synthesized
cacagacuuggagaagaggg

SEQ ID NO: 73 - RNA, 20 nt, Artificial Sequence
  synthesized
cucacagacuuggagaagag

SEQ ID NO: 74 - RNA, 20 nt, Artificial Sequence
  synthesized
cugccucagacuccuacucu

SEQ ID NO: 75 - RNA, 20 nt, Artificial Sequence
  synthesized
gaggccaggagcccacccuc

SEQ ID NO: 76 - RNA, 20 nt, Artificial Sequence
  synthesized
ugccucagacuccuacucuc

SEQ ID NO: 77 - RNA, 20 nt, Artificial Sequence
  synthesized
auacucaaggguuucuucca

SEQ ID NO: 78 - RNA, 20 nt, Artificial Sequence
  synthesized
gcgagaacagcacuggauac

SEQ ID NO: 79 - RNA, 20 nt, Artificial Sequence
  synthesized
ucauacucaaggguuucuuc

SEQ ID NO: 80 - RNA, 20 nt, Artificial Sequence
  synthesized
aaucuaccacuguagugugg

SEQ ID NO: 81 - RNA, 20 nt, Artificial Sequence
  synthesized
agccuccccacuaucaacac

SEQ ID NO: 82 - RNA, 20 nt, Artificial Sequence
  synthesized
uaaaucuaccacuguagugu

SEQ ID NO: 83 - RNA, 20 nt, Artificial Sequence
  synthesized
ccacacuuugaaguuggguc

SEQ ID NO: 84 - RNA, 20 nt, Artificial Sequence
  synthesized
gaacuuggcacuucaaaguc

SEQ ID NO: 85 - RNA, 20 nt, Artificial Sequence
  synthesized
cgcgggaggggagggggucu

SEQ ID NO: 86 - RNA, 20 nt, Artificial Sequence
  synthesized
cgggaggggagggggucugg

SEQ ID NO: 87 - RNA, 20 nt, Artificial Sequence
  synthesized
agucugaguuaaauguuucc

SEQ ID NO: 88 - RNA, 20 nt, Artificial Sequence
  synthesized
gacuguccccaggucuagcc

SEQ ID NO: 89 - RNA, 20 nt, Artificial Sequence
  synthesized
gagacuguccccaggucuag

SEQ ID NO: 90 - RNA, 20 nt, Artificial Sequence
  synthesized
gucccacuccuacccagggc

SEQ ID NO: 91 - RNA, 20 nt, Artificial Sequence
  synthesized
ccuggcucaggccucaggag

SEQ ID NO: 92 - RNA, 20 nt, Artificial Sequence
  synthesized
gaccuggcucaggccucagg

SEQ ID NO: 93 - RNA, 20 nt, Artificial Sequence
  synthesized
acuaugaauacguacaggca

SEQ ID NO: 94 - RNA, 20 nt, Artificial Sequence
  synthesized
gacuaugaauacguacaggc

SEQ ID NO: 95 - RNA, 20 nt, Artificial Sequence
  synthesized
ggaagccugguucacugguc

SEQ ID NO: 96 - RNA, 20 nt, Artificial Sequence
  synthesized
caccuguguauacaccagug

SEQ ID NO: 97 - RNA, 20 nt, Artificial Sequence
  synthesized
cucaccuguguauacaccag

SEQ ID NO: 98 - RNA, 20 nt, Artificial Sequence
  synthesized
aauggaagcuccucuugugu

SEQ ID NO: 99 - RNA, 20 nt, Artificial Sequence
  synthesized
uuuuauugagcgccuucuac

SEQ ID NO: 100 - RNA, 20 nt, Artificial Sequence
  synthesized
aucaaaaaaugaucugggca

SEQ ID NO: 101 - RNA, 20 nt, Artificial Sequence
  synthesized
guucacggcaaaauugagca

SEQ ID NO: 102 - RNA, 20 nt, Artificial Sequence
  synthesized
aaaccguggaguuuaaccug

SEQ ID NO: 103 - RNA, 20 nt, Artificial Sequence
  synthesized
aaacuguggaguuuaaccug

SEQ ID NO: 104 - RNA, 20 nt, Artificial Sequence
  synthesized
accguggaguuuaaccugac

SEQ ID NO: 105 - RNA, 20 nt, Artificial Sequence
  synthesized
acuguggaguuuaaccugac

SEQ ID NO: 106 - RNA, 20 nt, Artificial Sequence
  synthesized
gaaaaccguggaguuuaacc

SEQ ID NO: 107 - RNA, 20 nt, Artificial Sequence
  synthesized
gaaaacuguggaguuuaacc

SEQ ID NO: 108 - RNA, 20 nt, Artificial Sequence
  synthesized
ucaagugaggaggaaaaccg

SEQ ID NO: 109 - RNA, 20 nt, Artificial Sequence
  synthesized
ucaagugaggaggaaaacug

SEQ ID NO: 110 - RNA, 20 nt, Artificial Sequence
  synthesized
aucccacccagcuccucagg

SEQ ID NO: 111 - RNA, 20 nt, Artificial Sequence
  synthesized
gucccacccagcuccucagg

SEQ ID NO: 112 - RNA, 20 nt, Artificial Sequence
  synthesized
uaaucccacccagcuccuca

SEQ ID NO: 113 - RNA, 20 nt, Artificial Sequence
  synthesized
uagucccacccagcuccuca

SEQ ID NO: 114 - RNA, 20 nt, Artificial Sequence
  synthesized
aagggugacggcuugggaac

SEQ ID NO: 115 - RNA, 20 nt, Artificial Sequence
  synthesized
aagggugacggcuugggauc

SEQ ID NO: 116 - RNA, 20 nt, Artificial Sequence
  synthesized
cccuaguaccucaccagauc

SEQ ID NO: 117 - RNA, 20 nt, Artificial Sequence
  synthesized
cccuaguaccucaccaguuc

SEQ ID NO: 118 - RNA, 20 nt, Artificial Sequence
  synthesized
uaccucaccagaucccaagc

SEQ ID NO: 119 - RNA, 20 nt, Artificial Sequence
  synthesized
uaccucaccaguucccaagc

SEQ ID NO: 120 - RNA, 20 nt, Artificial Sequence
  synthesized
uugggaacuggugagguacu

SEQ ID NO: 121 - RNA, 20 nt, Artificial Sequence
  synthesized
uugggaucuggugagguacu

SEQ ID NO: 122 - RNA, 20 nt, Artificial Sequence
  synthesized
agucacauaagugugcaagu

SEQ ID NO: 123 - RNA, 20 nt, Artificial Sequence
  synthesized
agucacguaagugugcaagu

SEQ ID NO: 124 - RNA, 20 nt, Artificial Sequence
  synthesized
ccccuaagucacauaagugu

SEQ ID NO: 125 - RNA, 20 nt, Artificial Sequence
  synthesized
ccccuaagucacguaagugu

SEQ ID NO: 126 - RNA, 20 nt, Artificial Sequence
  synthesized
uuacgugacuuaggggcucu

SEQ ID NO: 127 - RNA, 20 nt, Artificial Sequence
  synthesized
uuaugugacuuaggggcucu

SEQ ID NO: 128 - RNA, 20 nt, Artificial Sequence
  synthesized
uugcacacuuacgugacuua

SEQ ID NO: 129 - RNA, 20 nt, Artificial Sequence
  synthesized
uugcacacuuaugugacuua

SEQ ID NO: 130 - RNA, 20 nt, Artificial Sequence
  synthesized
acccggcgucaccacacaca

SEQ ID NO: 131 - RNA, 20 nt, Artificial Sequence
  synthesized
acccggggucaccacacaca

SEQ ID NO: 132 - RNA, 20 nt, Artificial Sequence
  synthesized
caccuguguguggugacccc

SEQ ID NO: 133 - RNA, 20 nt, Artificial Sequence
  synthesized
caccuguguguggugacgcc

SEQ ID NO: 134 - RNA, 20 nt, Artificial Sequence
  synthesized
ccggcgucaccacacacagg

SEQ ID NO: 135 - RNA, 20 nt, Artificial Sequence
  synthesized
ccggggucaccacacacagg

SEQ ID NO: 136 - RNA, 20 nt, Artificial Sequence
  synthesized
gccaccuguguguggugacc

SEQ ID NO: 137 - RNA, 20 nt, Artificial Sequence
  synthesized
gccaccuguguguggugacg

SEQ ID NO: 138 - RNA, 20 nt, Artificial Sequence
  synthesized
uguguguggugaccccgggu

SEQ ID NO: 139 - RNA, 20 nt, Artificial Sequence
  synthesized
uguguguggugacgccgggu

SEQ ID NO: 140 - RNA, 20 nt, Artificial Sequence
  synthesized
acaagaagggaccaagacaa

SEQ ID NO: 141 - RNA, 20 nt, Artificial Sequence
  synthesized
acaagaagggacuaagacaa

SEQ ID NO: 142 - RNA, 20 nt, Artificial Sequence
  synthesized
caagacaaggacuccuuugu

SEQ ID NO: 143 - RNA, 20 nt, Artificial Sequence
  synthesized
cagauuacaagaagggacca

SEQ ID NO: 144 - RNA, 20 nt, Artificial Sequence
  synthesized
cagauuacaagaagggacua

SEQ ID NO: 145 - RNA, 20 nt, Artificial Sequence
  synthesized
uaagacaaggacuccuuugu

SEQ ID NO: 146 - RNA, 20 nt, Artificial Sequence
  synthesized
accucagggcauuugcacag

SEQ ID NO: 147 - RNA, 20 nt, Artificial Sequence
  synthesized
accucagggcauuuguacag

SEQ ID NO: 148 - RNA, 20 nt, Artificial Sequence
  synthesized
auuugcacagacacacaggu

SEQ ID NO: 149 - RNA, 20 nt, Artificial Sequence
  synthesized
auuuguacagacacacaggu

SEQ ID NO: 150 - RNA, 20 nt, Artificial Sequence
  synthesized
ccaccucagggcauuugcac

SEQ ID NO: 151 - RNA, 20 nt, Artificial Sequence
  synthesized
ccaccucagggcauuuguac

SEQ ID NO: 152 - RNA, 20 nt, Artificial Sequence
  synthesized
cuguacaaaugcccugaggu

SEQ ID NO: 153 - RNA, 20 nt, Artificial Sequence
  synthesized
cugugcaaaugcccugaggu

SEQ ID NO: 154 - RNA, 20 nt, Artificial Sequence
  synthesized
gcacagacacacaggugccc

SEQ ID NO: 155 - RNA, 20 nt, Artificial Sequence
  synthesized
gggcauuugcacagacacac

SEQ ID NO: 156 - RNA, 20 nt, Artificial Sequence
  synthesized
gggcauuuguacagacacac

SEQ ID NO: 157 - RNA, 20 nt, Artificial Sequence
  synthesized
guacagacacacaggugccc

SEQ ID NO: 158 - RNA, 20 nt, Artificial Sequence
  synthesized
gugucuguacaaaugcccug

SEQ ID NO: 159 - RNA, 20 nt, Artificial Sequence
  synthesized
gugucugugcaaaugcccug

SEQ ID NO: 160 - RNA, 20 nt, Artificial Sequence
  synthesized
gugugucuguacaaaugccc

SEQ ID NO: 161 - RNA, 20 nt, Artificial Sequence
  synthesized
gugugucugugcaaaugccc

SEQ ID NO: 162 - RNA, 20 nt, Artificial Sequence
  synthesized
ucccaccucagggcauuugc

SEQ ID NO: 163 - RNA, 20 nt, Artificial Sequence
  synthesized
ucccaccucagggcauuugu

SEQ ID NO: 164 - RNA, 20 nt, Artificial Sequence
  synthesized
uugcacagacacacaggugc

SEQ ID NO: 165 - RNA, 20 nt, Artificial Sequence
  synthesized
uuguacagacacacaggugc

SEQ ID NO: 166 - RNA, 20 nt, Artificial Sequence
  synthesized
cuaaucuuccugcucugcua

SEQ ID NO: 167 - RNA, 20 nt, Artificial Sequence
  synthesized
gcagagcaggaagauuaaga

SEQ ID NO: 168 - RNA, 20 nt, Artificial Sequence
  synthesized
gcagagcaggaagauuagga

SEQ ID NO: 169 - RNA, 20 nt, Artificial Sequence
  synthesized
ggaagauuaagaacucgcca

SEQ ID NO: 170 - RNA, 20 nt, Artificial Sequence
  synthesized
ggaagauuaggaacucgcca

SEQ ID NO: 171 - RNA, 20 nt, Artificial Sequence
  synthesized
uuaaucuuccugcucugcua

SEQ ID NO: 172 - RNA, 20 nt, Artificial Sequence
  synthesized
aguggagugaagaaggcagu

SEQ ID NO: 173 - RNA, 20 nt, Artificial Sequence
  synthesized
aguggagugaagaaggcggu

SEQ ID NO: 174 - RNA, 20 nt, Artificial Sequence
  synthesized
cagugggugggagaaccugc

SEQ ID NO: 175 - RNA, 20 nt, Artificial Sequence
  synthesized
cggugggugggagaaccugc

SEQ ID NO: 176 - RNA, 20 nt, Artificial Sequence
  synthesized
gagugaagaaggcagugggu

SEQ ID NO: 177 - RNA, 20 nt, Artificial Sequence
  synthesized
gagugaagaaggcggugggu

SEQ ID NO: 178 - RNA, 20 nt, Artificial Sequence
  synthesized
gugaagaaggcagugggugg

SEQ ID NO: 179 - RNA, 20 nt, Artificial Sequence
  synthesized
gugaagaaggcggugggugg

SEQ ID NO: 180 - RNA, 20 nt, Artificial Sequence
  synthesized
aaacuauuucgcaaugaccu

SEQ ID NO: 181 - RNA, 20 nt, Artificial Sequence
  synthesized
acacuauuucgcaaugaccu

SEQ ID NO: 182 - RNA, 20 nt, Artificial Sequence
  synthesized
gccuagaaaaaaaaacacua

SEQ ID NO: 183 - RNA, 20 nt, Artificial Sequence
  synthesized
uaguguuuuuuuuucuaggc

SEQ ID NO: 184 - RNA, 20 nt, Artificial Sequence
  synthesized
uuuuuuauagagacaggauc

SEQ ID NO: 185 - RNA, 20 nt, Artificial Sequence
  synthesized
aaccccaccucaggcucucg

SEQ ID NO: 186 - RNA, 20 nt, Artificial Sequence
  synthesized
aaccccaccuccggcucucg

SEQ ID NO: 187 - RNA, 20 nt, Artificial Sequence
  synthesized
agagccggaggugggguugc

SEQ ID NO: 188 - RNA, 20 nt, Artificial Sequence
  synthesized
agagccugaggugggguugc

SEQ ID NO: 189 - RNA, 20 nt, Artificial Sequence
  synthesized
caggcucucggaagacccuc

SEQ ID NO: 190 - RNA, 20 nt, Artificial Sequence
  synthesized
ccccaccucaggcucucgga

SEQ ID NO: 191 - RNA, 20 nt, Artificial Sequence
  synthesized
ccccaccuccggcucucgga

SEQ ID NO: 192 - RNA, 20 nt, Artificial Sequence
  synthesized
ccggcucucggaagacccuc

SEQ ID NO: 193 - RNA, 20 nt, Artificial Sequence
  synthesized
gagggucuuccgagagccgg

SEQ ID NO: 194 - RNA, 20 nt, Artificial Sequence
  synthesized
gagggucuuccgagagccug

SEQ ID NO: 195 - RNA, 20 nt, Artificial Sequence
  synthesized
gcaaccccaccucaggcucu

SEQ ID NO: 196 - RNA, 20 nt, Artificial Sequence
  synthesized
gcaaccccaccuccggcucu

SEQ ID NO: 197 - RNA, 20 nt, Artificial Sequence
  synthesized
gucuuccgagagccggaggu

SEQ ID NO: 198 - RNA, 20 nt, Artificial Sequence
  synthesized
gucuuccgagagccugaggu

SEQ ID NO: 199 - RNA, 20 nt, Artificial Sequence
  synthesized
acagugccccacagacaccc

SEQ ID NO: 200 - RNA, 20 nt, Artificial Sequence
  synthesized
acagugccccacagacgccc

SEQ ID NO: 201 - RNA, 20 nt, Artificial Sequence
  synthesized
gggcgucuguggggcacugu

SEQ ID NO: 202 - RNA, 20 nt, Artificial Sequence
  synthesized
gggugucuguggggcacugu

SEQ ID NO: 203 - RNA, 20 nt, Artificial Sequence
  synthesized
uggggcugaggggcgucugu

SEQ ID NO: 204 - RNA, 20 nt, Artificial Sequence
  synthesized
uggggcugaggggugucugu

SEQ ID NO: 205 - RNA, 20 nt, Artificial Sequence
  synthesized
aaggagggggccuggcauag

SEQ ID NO: 206 - RNA, 20 nt, Artificial Sequence
  synthesized
aaggagggggcuuggcauag

SEQ ID NO: 207 - RNA, 20 nt, Artificial Sequence
  synthesized
agaaagaaaaggagggggcc

SEQ ID NO: 208 - RNA, 20 nt, Artificial Sequence
  synthesized
agaaagaaaaggagggggcu

SEQ ID NO: 209 - RNA, 20 nt, Artificial Sequence
  synthesized
agcccccuccuuuucuuucu

SEQ ID NO: 210 - RNA, 20 nt, Artificial Sequence
  synthesized
aggagggggcuuggcauagc

SEQ ID NO: 211 - RNA, 20 nt, Artificial Sequence
  synthesized
caggcccccuccuuuucuuu

SEQ ID NO: 212 - RNA, 20 nt, Artificial Sequence
  synthesized
gcuuggcauagcuggacagg

SEQ ID NO: 213 - RNA, 20 nt, Artificial Sequence
  synthesized
ggagggggccuggcauagcu

SEQ ID NO: 214 - RNA, 20 nt, Artificial Sequence
  synthesized
ggagggggcuuggcauagcu

SEQ ID NO: 215 - RNA, 20 nt, Artificial Sequence
  synthesized
ggcccccuccuuuucuuucu

SEQ ID NO: 216 - RNA, 20 nt, Artificial Sequence
  synthesized
ggccuggcauagcuggacag

SEQ ID NO: 217 - RNA, 20 nt, Artificial Sequence
  synthesized
ggcuuggcauagcuggacag

SEQ ID NO: 218 - RNA, 20 nt, Artificial Sequence
  synthesized
gggcuuggcauagcuggaca

SEQ ID NO: 219 - RNA, 20 nt, Artificial Sequence
  synthesized
ggggccuggcauagcuggac

SEQ ID NO: 220 - RNA, 20 nt, Artificial Sequence
  synthesized
ggggcuuggcauagcuggac

SEQ ID NO: 221 - RNA, 20 nt, Artificial Sequence
  synthesized
aauacaaaucagcugggcgu

SEQ ID NO: 222 - RNA, 20 nt, Artificial Sequence
  synthesized
uacaaaucagcugggcgucg

SEQ ID NO: 223 - RNA, 20 nt, Artificial Sequence
  synthesized
ccggggcugguggagcgggg

SEQ ID NO: 224 - RNA, 20 nt, Artificial Sequence
  synthesized
ccggggcugguggagggggg

SEQ ID NO: 225 - RNA, 20 nt, Artificial Sequence
  synthesized
ccugccggggcugguggagc

SEQ ID NO: 226 - RNA, 20 nt, Artificial Sequence
  synthesized
ccugccggggcugguggagg

SEQ ID NO: 227 - RNA, 20 nt, Artificial Sequence
  synthesized
cugguggagcggggugaguc

SEQ ID NO: 228 - RNA, 20 nt, Artificial Sequence
  synthesized
cugguggaggggggugaguc

SEQ ID NO: 229 - RNA, 20 nt, Artificial Sequence
  synthesized
gagcggggugagucuggugg

SEQ ID NO: 230 - RNA, 20 nt, Artificial Sequence
  synthesized
gaggggggugagucuggugg

SEQ ID NO: 231 - RNA, 20 nt, Artificial Sequence
  synthesized
gcggggugagucuggugggg

SEQ ID NO: 232 - RNA, 20 nt, Artificial Sequence
  synthesized
ggggggugagucuggugggg

SEQ ID NO: 233 - RNA, 20 nt, Artificial Sequence
  synthesized
ugccggggcugguggagcgg

SEQ ID NO: 234 - RNA, 20 nt, Artificial Sequence
  synthesized
ugccggggcugguggagggg

SEQ ID NO: 235 - RNA, 20 nt, Artificial Sequence
  synthesized
uggagcggggugagucuggu

SEQ ID NO: 236 - RNA, 20 nt, Artificial Sequence
  synthesized
uggaggggggugagucuggu

SEQ ID NO: 237 - RNA, 20 nt, Artificial Sequence
  synthesized
aauugcucucagagagcgau

SEQ ID NO: 238 - RNA, 20 nt, Artificial Sequence
  synthesized
aauugcucucagagagugau

SEQ ID NO: 239 - RNA, 20 nt, Artificial Sequence
  synthesized
agagagcgauggggccuuga

SEQ ID NO: 240 - RNA, 20 nt, Artificial Sequence
  synthesized
agagagugauggggccuuga

SEQ ID NO: 241 - RNA, 20 nt, Artificial Sequence
  synthesized
agagcgauggggccuugaug

SEQ ID NO: 242 - RNA, 20 nt, Artificial Sequence
  synthesized
agagugauggggccuugaug

SEQ ID NO: 243 - RNA, 20 nt, Artificial Sequence
  synthesized
ucaaggccccaucacucucu

SEQ ID NO: 244 - RNA, 20 nt, Artificial Sequence
  synthesized
ucaaggccccaucgcucucu

SEQ ID NO: 245 - RNA, 20 nt, Artificial Sequence
  synthesized
accccaugaagcccuuccug

SEQ ID NO: 246 - RNA, 20 nt, Artificial Sequence
  synthesized
accccaugacgcccuuccug

SEQ ID NO: 247 - RNA, 20 nt, Artificial Sequence
  synthesized
caggcaggaagggcgucaug

SEQ ID NO: 248 - RNA, 20 nt, Artificial Sequence
  synthesized
caggcaggaagggcuucaug

SEQ ID NO: 249 - RNA, 20 nt, Artificial Sequence
  synthesized
cccaugaagcccuuccugcc

SEQ ID NO: 250 - RNA, 20 nt, Artificial Sequence
  synthesized
cccaugacgcccuuccugcc

SEQ ID NO: 251 - RNA, 20 nt, Artificial Sequence
  synthesized
gcgucaugggguguggaaau

SEQ ID NO: 252 - RNA, 20 nt, Artificial Sequence
  synthesized
gcuucaugggguguggaaau

SEQ ID NO: 253 - RNA, 20 nt, Artificial Sequence
  synthesized
ggaagggcgucauggggugu

SEQ ID NO: 254 - RNA, 20 nt, Artificial Sequence
  synthesized
ggaagggcuucauggggugu

SEQ ID NO: 255 - RNA, 20 nt, Artificial Sequence
  synthesized
gucaggcaggaagggcguca

SEQ ID NO: 256 - RNA, 20 nt, Artificial Sequence
  synthesized
gucaggcaggaagggcuuca

SEQ ID NO: 257 - RNA, 20 nt, Artificial Sequence
  synthesized
cacugaucacaggcuguccu

SEQ ID NO: 258 - RNA, 20 nt, Artificial Sequence
  synthesized
cacugaucauaggcuguccu

SEQ ID NO: 259 - RNA, 20 nt, Artificial Sequence
  synthesized
cagccuaugaucagugaugc

SEQ ID NO: 260 - RNA, 20 nt, Artificial Sequence
  synthesized
cagccugugaucagugaugc

SEQ ID NO: 261 - RNA, 20 nt, Artificial Sequence
  synthesized
gaaggacagccuaugaucag

SEQ ID NO: 262 - RNA, 20 nt, Artificial Sequence
  synthesized
gaaggacagccugugaucag

SEQ ID NO: 263 - RNA, 20 nt, Artificial Sequence
  synthesized
gccuaugaucagugaugcag

SEQ ID NO: 264 - RNA, 20 nt, Artificial Sequence
  synthesized
gccugugaucagugaugcag

SEQ ID NO: 265 - RNA, 20 nt, Artificial Sequence
  synthesized
uccacugcaucacugaucac

SEQ ID NO: 266 - RNA, 20 nt, Artificial Sequence
  synthesized
uccacugcaucacugaucau

SEQ ID NO: 267 - RNA, 20 nt, Artificial Sequence
  synthesized
ucgaaggacagccuaugauc

SEQ ID NO: 268 - RNA, 20 nt, Artificial Sequence
  synthesized
ucgaaggacagccugugauc

SEQ ID NO: 269 - RNA, 20 nt, Artificial Sequence
  synthesized
agccucaaacucuggauaca

SEQ ID NO: 270 - RNA, 20 nt, Artificial Sequence
  synthesized
agucucaaacucuggauaca

SEQ ID NO: 271 - RNA, 20 nt, Artificial Sequence
  synthesized
caaacccaagccucaaacuc

SEQ ID NO: 272 - RNA, 20 nt, Artificial Sequence
  synthesized
caaacccaagucucaaacuc

SEQ ID NO: 273 - RNA, 20 nt, Artificial Sequence
  synthesized
caagccucaaacucuggaua

SEQ ID NO: 274 - RNA, 20 nt, Artificial Sequence
  synthesized
caagucucaaacucuggaua

SEQ ID NO: 275 - RNA, 20 nt, Artificial Sequence
  synthesized
cagaguuugagacuuggguu

SEQ ID NO: 276 - RNA, 20 nt, Artificial Sequence
  synthesized
cagaguuugaggcuuggguu

SEQ ID NO: 277 - RNA, 20 nt, Artificial Sequence
  synthesized
gagacuuggguuugagcucc

SEQ ID NO: 278 - RNA, 20 nt, Artificial Sequence
  synthesized
gaggcuuggguuugagcucc

SEQ ID NO: 279 - RNA, 20 nt, Artificial Sequence
  synthesized
uguauccagaguuugagacu

SEQ ID NO: 280 - RNA, 20 nt, Artificial Sequence
  synthesized
uguauccagaguuugaggcu

SEQ ID NO: 281 - RNA, 20 nt, Artificial Sequence
  synthesized
aagagagguuggccggguac

SEQ ID NO: 282 - RNA, 20 nt, Artificial Sequence
  synthesized
cuguacccggccaaccucuc

SEQ ID NO: 283 - RNA, 20 nt, Artificial Sequence
  synthesized
gagagguuggccggguacag

SEQ ID NO: 284 - RNA, 20 nt, Artificial Sequence
  synthesized
aaggucccgaacacuucccu

SEQ ID NO: 285 - RNA, 20 nt, Artificial Sequence
  synthesized
aaggucccggacacuucccu

SEQ ID NO: 286 - RNA, 20 nt, Artificial Sequence
  synthesized
gaacacuucccuaggauccc

SEQ ID NO: 287 - RNA, 20 nt, Artificial Sequence
  synthesized
ggacacuucccuaggauccc

SEQ ID NO: 288 - RNA, 20 nt, Artificial Sequence
  synthesized
gggauccuagggaagugucc

SEQ ID NO: 289 - RNA, 20 nt, Artificial Sequence
  synthesized
gggauccuagggaaguguuc

SEQ ID NO: 290 - RNA, 20 nt, Artificial Sequence
  synthesized
guguccgggaccuuuucuca

SEQ ID NO: 291 - RNA, 20 nt, Artificial Sequence
  synthesized
guguucgggaccuuuucuca

SEQ ID NO: 292 - RNA, 20 nt, Artificial Sequence
  synthesized
accagggcuggaauuuagga

SEQ ID NO: 293 - RNA, 20 nt, Artificial Sequence
  synthesized
accagggcuggaauuuaggg

SEQ ID NO: 294 - RNA, 20 nt, Artificial Sequence
  synthesized
cccuaaauuccagcccuggu

SEQ ID NO: 295 - RNA, 20 nt, Artificial Sequence
  synthesized
gaggggguguugcccuaaau

SEQ ID NO: 296 - RNA, 20 nt, Artificial Sequence
  synthesized
gaggggguguuguccuaaau

SEQ ID NO: 297 - RNA, 20 nt, Artificial Sequence
  synthesized
guguugcccuaaauuccagc

SEQ ID NO: 298 - RNA, 20 nt, Artificial Sequence
  synthesized
guguuguccuaaauuccagc

SEQ ID NO: 299 - RNA, 20 nt, Artificial Sequence
  synthesized
guugcccuaaauuccagccc

SEQ ID NO: 300 - RNA, 20 nt, Artificial Sequence
  synthesized
guuguccuaaauuccagccc

SEQ ID NO: 301 - RNA, 20 nt, Artificial Sequence
  synthesized
uccuaaauuccagcccuggu

SEQ ID NO: 302 - RNA, 20 nt, Artificial Sequence
  synthesized
agccucagacuacaggcaca

SEQ ID NO: 303 - RNA, 20 nt, Artificial Sequence
  synthesized
agccucagacugcaggcaca

SEQ ID NO: 304 - RNA, 20 nt, Artificial Sequence
  synthesized
cagucugaggcugaguaucg

SEQ ID NO: 305 - RNA, 20 nt, Artificial Sequence
  synthesized
cgugugccugcagucugagg

SEQ ID NO: 306 - RNA, 20 nt, Artificial Sequence
  synthesized
cgugugccuguagucugagg

SEQ ID NO: 307 - RNA, 20 nt, Artificial Sequence
  synthesized
uagucugaggcugaguaucg

SEQ ID NO: 308 - RNA, 20 nt, Artificial Sequence
  synthesized
ugcagucugaggcugaguau

SEQ ID NO: 309 - RNA, 20 nt, Artificial Sequence
  synthesized
uguagucugaggcugaguau

SEQ ID NO: 310 - RNA, 20 nt, Artificial Sequence
  synthesized
acuugccuccacacccagcc

SEQ ID NO: 311 - RNA, 20 nt, Artificial Sequence
  synthesized
acuugccuccacacccaucc

SEQ ID NO: 312 - RNA, 20 nt, Artificial Sequence
  synthesized
gccuccacacccagcccaag

SEQ ID NO: 313 - RNA, 20 nt, Artificial Sequence
  synthesized
gccuccacacccaucccaag

SEQ ID NO: 314 - RNA, 20 nt, Artificial Sequence
  synthesized
ggauggguguggaggcaagu

SEQ ID NO: 315 - RNA, 20 nt, Artificial Sequence
  synthesized
ggcuggguguggaggcaagu

SEQ ID NO: 316 - RNA, 20 nt, Artificial Sequence
  synthesized
uaagaaucuugucuugggau

SEQ ID NO: 317 - RNA, 20 nt, Artificial Sequence
  synthesized
uaagaaucuugucuugggcu

SEQ ID NO: 318 - RNA, 20 nt, Artificial Sequence
  synthesized
ucuugucuugggaugggugu

SEQ ID NO: 319 - RNA, 20 nt, Artificial Sequence
  synthesized
ucuugucuugggcugggugu

SEQ ID NO: 320 - RNA, 20 nt, Artificial Sequence
  synthesized
ugggauggguguggaggcaa

SEQ ID NO: 321 - RNA, 20 nt, Artificial Sequence
  synthesized
ugggcuggguguggaggcaa

SEQ ID NO: 322 - RNA, 20 nt, Artificial Sequence
  synthesized
uugccuccacacccagccca

SEQ ID NO: 323 - RNA, 20 nt, Artificial Sequence
  synthesized
uugccuccacacccauccca

SEQ ID NO: 324 - RNA, 20 nt, Artificial Sequence
  synthesized
uugucuugggaugggugugg

SEQ ID NO: 325 - RNA, 20 nt, Artificial Sequence
  synthesized
uugucuugggcugggugugg

SEQ ID NO: 326 - RNA, 20 nt, Artificial Sequence
  synthesized
gaugagcuggauguagcugu

SEQ ID NO: 327 - RNA, 20 nt, Artificial Sequence
  synthesized
gaugagcuguauguagcugu

SEQ ID NO: 328 - RNA, 20 nt, Artificial Sequence
  synthesized
guauguagcugucgcaauac

SEQ ID NO: 329 - RNA, 20 nt, Artificial Sequence
  synthesized
cccuuuagaaggcagagcgg

SEQ ID NO: 330 - RNA, 20 nt, Artificial Sequence
  synthesized
cccuuuagaaggcagaucgg

SEQ ID NO: 331 - RNA, 20 nt, Artificial Sequence
  synthesized
gaucugccuucuaaagggca

SEQ ID NO: 332 - RNA, 20 nt, Artificial Sequence
  synthesized
gcucugccuucuaaagggca

SEQ ID NO: 333 - RNA, 20 nt, Artificial Sequence
  synthesized
ggugccgaucugccuucuaa

SEQ ID NO: 334 - RNA, 20 nt, Artificial Sequence
  synthesized
ggugccgcucugccuucuaa

SEQ ID NO: 335 - RNA, 20 nt, Artificial Sequence
  synthesized
uagcuaaugcacgcaaggcu

SEQ ID NO: 336 - RNA, 20 nt, Artificial Sequence
  synthesized
cugauccuuugaaugcagcc

SEQ ID NO: 337 - RNA, 20 nt, Artificial Sequence
  synthesized
cugauccuuugaaugcaucc

SEQ ID NO: 338 - RNA, 20 nt, Artificial Sequence
  synthesized
gauccuuugaaugcagccaa

SEQ ID NO: 339 - RNA, 20 nt, Artificial Sequence
  synthesized
gauccuuugaaugcauccaa

SEQ ID NO: 340 - RNA, 20 nt, Artificial Sequence
  synthesized
ggaugcauucaaaggaucag

SEQ ID NO: 341 - RNA, 20 nt, Artificial Sequence
  synthesized
ggcugcauucaaaggaucag

SEQ ID NO: 342 - RNA, 20 nt, Artificial Sequence
  synthesized
ugacccuuggaugcauucaa

SEQ ID NO: 343 - RNA, 20 nt, Artificial Sequence
  synthesized
ugacccuuggcugcauucaa

SEQ ID NO: 344 - RNA, 20 nt, Artificial Sequence
  synthesized
uuggaugcauucaaaggauc

SEQ ID NO: 345 - RNA, 20 nt, Artificial Sequence
  synthesized
uuggcugcauucaaaggauc

SEQ ID NO: 346 - RNA, 20 nt, Artificial Sequence
  synthesized
caagggcagcggcacaguca

SEQ ID NO: 347 - RNA, 20 nt, Artificial Sequence
  synthesized
caugacugugccgcugcccu

SEQ ID NO: 348 - RNA, 20 nt, Artificial Sequence
  synthesized
cccaggcucaagggcagcgg

SEQ ID NO: 349 - RNA, 20 nt, Artificial Sequence
  synthesized
ugccgcugcccuugagccug

SEQ ID NO: 350 - RNA, 20 nt, Artificial Sequence
  synthesized
ugugccgcugcccuugagcc

SEQ ID NO: 351 - RNA, 20 nt, Artificial Sequence
  synthesized
agaaacugaaguuagacguu

SEQ ID NO: 352 - RNA, 20 nt, Artificial Sequence
  synthesized
agagaaacugaaguuagacg

SEQ ID NO: 353 - RNA, 20 nt, Artificial Sequence
  synthesized
agugaaacugaaguuagacg

SEQ ID NO: 354 - RNA, 20 nt, Artificial Sequence
  synthesized
cggacugcagccagagaaac

SEQ ID NO: 355 - RNA, 20 nt, Artificial Sequence
  synthesized
cggacugcagccagugaaac

SEQ ID NO: 356 - RNA, 20 nt, Artificial Sequence
  synthesized
ugaaacugaaguuagacguu

SEQ ID NO: 357 - RNA, 20 nt, Artificial Sequence
  synthesized
cgacagccaccacgccuagc

SEQ ID NO: 358 - RNA, 20 nt, Artificial Sequence
  synthesized
gcacugggauuacaggcgag

SEQ ID NO: 359 - RNA, 20 nt, Artificial Sequence
  synthesized
uacaggcgacagccaccacg

SEQ ID NO: 360 - RNA, 20 nt, Artificial Sequence
  synthesized
uaggcgugguggcugucgcc

SEQ ID NO: 361 - RNA, 20 nt, Artificial Sequence
  synthesized
agugggguguagucaagauu

SEQ ID NO: 362 - RNA, 20 nt, Artificial Sequence
  synthesized
agugggguguggucaagauu

SEQ ID NO: 363 - RNA, 20 nt, Artificial Sequence
  synthesized
gagccaggagugggguguag

SEQ ID NO: 364 - RNA, 20 nt, Artificial Sequence
  synthesized
gagccaggaguggggugugg

SEQ ID NO: 365 - RNA, 20 nt, Artificial Sequence
  synthesized
ucuugaccacaccccacucc

SEQ ID NO: 366 - RNA, 20 nt, Artificial Sequence
  synthesized
ucuugacuacaccccacucc

SEQ ID NO: 367 - RNA, 20 nt, Artificial Sequence
  synthesized
ugggguguagucaagauuug

SEQ ID NO: 368 - RNA, 20 nt, Artificial Sequence
  synthesized
ugggguguggucaagauuug

SEQ ID NO: 369 - RNA, 20 nt, Artificial Sequence
  synthesized
agaguguuugggacgggcaa

SEQ ID NO: 370 - RNA, 20 nt, Artificial Sequence
  synthesized
agaguguuugggacgggcac

SEQ ID NO: 371 - RNA, 20 nt, Artificial Sequence
  synthesized
aguguuugggacgggcaagg

SEQ ID NO: 372 - RNA, 20 nt, Artificial Sequence
  synthesized
aguguuugggacgggcacgg

SEQ ID NO: 373 - RNA, 20 nt, Artificial Sequence
  synthesized
uuugggacgggcaagguggu

SEQ ID NO: 374 - RNA, 20 nt, Artificial Sequence
  synthesized
uuugggacgggcacgguggu

SEQ ID NO: 375 - RNA, 20 nt, Artificial Sequence
  synthesized
ccacaacccuucccacucug

SEQ ID NO: 376 - RNA, 20 nt, Artificial Sequence
  synthesized
ccacagcccuucccacucug

SEQ ID NO: 377 - RNA, 20 nt, Artificial Sequence
  synthesized
gaccacaacccuucccacuc

SEQ ID NO: 378 - RNA, 20 nt, Artificial Sequence
  synthesized
gaccacagcccuucccacuc

SEQ ID NO: 379 - RNA, 20 nt, Artificial Sequence
  synthesized
gggaagggcugugguccaca

SEQ ID NO: 380 - RNA, 20 nt, Artificial Sequence
  synthesized
gggaaggguugugguccaca

SEQ ID NO: 381 - RNA, 20 nt, Artificial Sequence
  synthesized
acauccuccuccuccuccca

SEQ ID NO: 382 - RNA, 20 nt, Artificial Sequence
  synthesized
accaccugggaggaggagga

SEQ ID NO: 383 - RNA, 20 nt, Artificial Sequence
  synthesized
auccuccuccuccucccagg

SEQ ID NO: 384 - RNA, 20 nt, Artificial Sequence
  synthesized
gaggaggaggaggaggaugu

SEQ ID NO: 385 - RNA, 20 nt, Artificial Sequence
  synthesized
ugggaggaggaggaggaugu

SEQ ID NO: 386 - RNA, 20 nt, Artificial Sequence
  synthesized
acuugggcaccaaugcaugc

SEQ ID NO: 387 - RNA, 20 nt, Artificial Sequence
  synthesized
acuugggcacuaaugcaugc

SEQ ID NO: 388 - RNA, 20 nt, Artificial Sequence
  synthesized
gcaccaaugcaugcugaaaa

SEQ ID NO: 389 - RNA, 20 nt, Artificial Sequence
  synthesized
gcacuaaugcaugcugaaaa

SEQ ID NO: 390 - RNA, 20 nt, Artificial Sequence
  synthesized
gcaugcauuagugcccaagu

SEQ ID NO: 391 - RNA, 20 nt, Artificial Sequence
  synthesized
gcaugcauuggugcccaagu

SEQ ID NO: 392 - RNA, 20 nt, Artificial Sequence
  synthesized
uuuucagcaugcauuagugc

SEQ ID NO: 393 - RNA, 20 nt, Artificial Sequence
  synthesized
uuuucagcaugcauuggugc

SEQ ID NO: 394 - RNA, 20 nt, Artificial Sequence
  synthesized
caggcccugguaccuggaga

SEQ ID NO: 395 - RNA, 20 nt, Artificial Sequence
  synthesized
caggcccugguaccuggaua

SEQ ID NO: 396 - RNA, 20 nt, Artificial Sequence
  synthesized
ccaccucuuauccagguacc

SEQ ID NO: 397 - RNA, 20 nt, Artificial Sequence
  synthesized
ccaccucuucuccagguacc

SEQ ID NO: 398 - RNA, 20 nt, Artificial Sequence
  synthesized
cucuuauccagguaccaggg

SEQ ID NO: 399 - RNA, 20 nt, Artificial Sequence
  synthesized
cucuucuccagguaccaggg

SEQ ID NO: 400 - RNA, 20 nt, Artificial Sequence
  synthesized
cugguaccuggagaagaggu

SEQ ID NO: 401 - RNA, 20 nt, Artificial Sequence
  synthesized
cugguaccuggauaagaggu

SEQ ID NO: 402 - RNA, 20 nt, Artificial Sequence
  synthesized
cuuauccagguaccagggcc

SEQ ID NO: 403 - RNA, 20 nt, Artificial Sequence
  synthesized
cuucuccagguaccagggcc

SEQ ID NO: 404 - RNA, 20 nt, Artificial Sequence
  synthesized
gaagaggugggggcgagccc

SEQ ID NO: 405 - RNA, 20 nt, Artificial Sequence
  synthesized
ggcccugguaccuggagaag

SEQ ID NO: 406 - RNA, 20 nt, Artificial Sequence
  synthesized
ggcccugguaccuggauaag

SEQ ID NO: 407 - RNA, 20 nt, Artificial Sequence
  synthesized
gguaccuggagaagaggugg

SEQ ID NO: 408 - RNA, 20 nt, Artificial Sequence
  synthesized
gguaccuggauaagaggugg

SEQ ID NO: 409 - RNA, 20 nt, Artificial Sequence
  synthesized
uaagaggugggggcgagccc

SEQ ID NO: 410 - RNA, 20 nt, Artificial Sequence
  synthesized
uaccuggagaagaggugggg

SEQ ID NO: 411 - RNA, 20 nt, Artificial Sequence
  synthesized
uaccuggauaagaggugggg

SEQ ID NO: 412 - RNA, 20 nt, Artificial Sequence
  synthesized
uacaaaaauuagcugggcuu

SEQ ID NO: 413 - RNA, 20 nt, Artificial Sequence
  synthesized
acaucuucccugccaaagca

SEQ ID NO: 414 - RNA, 20 nt, Artificial Sequence
  synthesized
acgucuucccugccaaagca

SEQ ID NO: 415 - RNA, 20 nt, Artificial Sequence
  synthesized
aucuucccugccaaagcaaa

SEQ ID NO: 416 - RNA, 20 nt, Artificial Sequence
  synthesized
gucuucccugccaaagcaaa

SEQ ID NO: 417 - RNA, 20 nt, Artificial Sequence
  synthesized
ugcuuuggcagggaagacgu

SEQ ID NO: 418 - RNA, 20 nt, Artificial Sequence
  synthesized
ugcuuuggcagggaagaugu

SEQ ID NO: 419 - RNA, 20 nt, Artificial Sequence
  synthesized
uuggcagggaagacguagau

SEQ ID NO: 420 - RNA, 20 nt, Artificial Sequence
  synthesized
uuggcagggaagauguagau

SEQ ID NO: 421 - RNA, 20 nt, Artificial Sequence
  synthesized
uuugcuuuggcagggaagac

SEQ ID NO: 422 - RNA, 20 nt, Artificial Sequence
  synthesized
uuugcuuuggcagggaagau

SEQ ID NO: 423 - RNA, 20 nt, Artificial Sequence
  synthesized
aaauggcuagcuuaauagau

SEQ ID NO: 424 - RNA, 20 nt, Artificial Sequence
  synthesized
aaucaaauggcuagcuuaau

SEQ ID NO: 425 - RNA, 20 nt, Artificial Sequence
  synthesized
agccugaaucaaauggcuag

SEQ ID NO: 426 - RNA, 20 nt, Artificial Sequence
  synthesized
agccugaaucaaaugguuag

SEQ ID NO: 427 - RNA, 20 nt, Artificial Sequence
  synthesized
ugaaucaaauggcuagcuua

SEQ ID NO: 428 - RNA, 20 nt, Artificial Sequence
  synthesized
ugaaucaaaugguuagcuua

SEQ ID NO: 429 - RNA, 20 nt, Artificial Sequence
  synthesized
uuuuaucuauuaagcuagcc

SEQ ID NO: 430 - RNA, 20 nt, Artificial Sequence
  synthesized
agaaaucuggaagauagccu

SEQ ID NO: 431 - RNA, 20 nt, Artificial Sequence
  synthesized
aggaaucuggaagauagccu

SEQ ID NO: 432 - RNA, 20 nt, Artificial Sequence
  synthesized
caacggcacuuaagaaaucu

SEQ ID NO: 433 - RNA, 20 nt, Artificial Sequence
  synthesized
caacggcacuuaaggaaucu

SEQ ID NO: 434 - RNA, 20 nt, Artificial Sequence
  synthesized
gcuaucuuccagauuccuua

SEQ ID NO: 435 - RNA, 20 nt, Artificial Sequence
  synthesized
gcuaucuuccagauuucuua

SEQ ID NO: 436 - RNA, 20 nt, Artificial Sequence
  synthesized
ggcacuuaagaaaucuggaa

SEQ ID NO: 437 - RNA, 20 nt, Artificial Sequence
  synthesized
ggcacuuaaggaaucuggaa

SEQ ID NO: 438 - RNA, 20 nt, Artificial Sequence
  synthesized
uaagaaaucuggaagauagc

SEQ ID NO: 439 - RNA, 20 nt, Artificial Sequence
  synthesized
uaaggaaucuggaagauagc

SEQ ID NO: 440 - RNA, 20 nt, Artificial Sequence
  synthesized
acccugagcucaggcagccc

SEQ ID NO: 441 - RNA, 20 nt, Artificial Sequence
  synthesized
acccugagcucaggcagccg

SEQ ID NO: 442 - RNA, 20 nt, Artificial Sequence
  synthesized
agcccugaucccugaaggac

SEQ ID NO: 443 - RNA, 20 nt, Artificial Sequence
  synthesized
aggcagcccugaucccugaa

SEQ ID NO: 444 - RNA, 20 nt, Artificial Sequence
  synthesized
agggcugccugagcucaggg

SEQ ID NO: 445 - RNA, 20 nt, Artificial Sequence
  synthesized
aucacggcugccugagcuca

SEQ ID NO: 446 - RNA, 20 nt, Artificial Sequence
  synthesized
aucagggcugccugagcuca

SEQ ID NO: 447 - RNA, 20 nt, Artificial Sequence
  synthesized
cagcccugaucccugaagga

SEQ ID NO: 448 - RNA, 20 nt, Artificial Sequence
  synthesized
cagccgugaucccugaagga

SEQ ID NO: 449 - RNA, 20 nt, Artificial Sequence
  synthesized
caggcagcccugaucccuga

SEQ ID NO: 450 - RNA, 20 nt, Artificial Sequence
  synthesized
caggcagccgugaucccuga

SEQ ID NO: 451 - RNA, 20 nt, Artificial Sequence
  synthesized
cggcugccugagcucagggu

SEQ ID NO: 452 - RNA, 20 nt, Artificial Sequence
  synthesized
cuucagggaucacggcugcc

SEQ ID NO: 453 - RNA, 20 nt, Artificial Sequence
  synthesized
cuucagggaucagggcugcc

SEQ ID NO: 454 - RNA, 20 nt, Artificial Sequence
  synthesized
gaucagggcugccugagcuc

SEQ ID NO: 455 - RNA, 20 nt, Artificial Sequence
  synthesized
gcucaggcagcccugauccc

SEQ ID NO: 456 - RNA, 20 nt, Artificial Sequence
  synthesized
gggcugccugagcucagggu

SEQ ID NO: 457 - RNA, 20 nt, Artificial Sequence
  synthesized
ucagggcugccugagcucag

SEQ ID NO: 458 - RNA, 20 nt, Artificial Sequence
  synthesized
aagagaagccugccggggcu

SEQ ID NO: 459 - RNA, 20 nt, Artificial Sequence
  synthesized
aggagaagccugccggggcu

SEQ ID NO: 460 - RNA, 20 nt, Artificial Sequence
  synthesized
gauggaaagagaagccugcc

SEQ ID NO: 461 - RNA, 20 nt, Artificial Sequence
  synthesized
gauggaaggagaagccugcc

SEQ ID NO: 462 - RNA, 20 nt, Artificial Sequence
  synthesized
ggcuucuccuuccaucucuc

SEQ ID NO: 463 - RNA, 20 nt, Artificial Sequence
  synthesized
ggcuucucuuuccaucucuc

SEQ ID NO: 464 - RNA, 20 nt, Artificial Sequence
  synthesized
aaaaauggugugugggagug

SEQ ID NO: 465 - RNA, 20 nt, Artificial Sequence
  synthesized
aaaaauggugugugggggug

SEQ ID NO: 466 - RNA, 20 nt, Artificial Sequence
  synthesized
aaauggugugugggaguggg

SEQ ID NO: 467 - RNA, 20 nt, Artificial Sequence
  synthesized
aaaugguguguggggguggg

SEQ ID NO: 468 - RNA, 20 nt, Artificial Sequence
  synthesized
gcaaaaauggugugugggag

SEQ ID NO: 469 - RNA, 20 nt, Artificial Sequence
  synthesized
gcaaaaaugguguguggggg

SEQ ID NO: 470 - RNA, 20 nt, Artificial Sequence
  synthesized
ugggagugggggacaagggg

SEQ ID NO: 471 - RNA, 20 nt, Artificial Sequence
  synthesized
ugugggagugggggacaagg

SEQ ID NO: 472 - RNA, 20 nt, Artificial Sequence
  synthesized
ugugggggugggggacaagg

SEQ ID NO: 473 - RNA, 20 nt, Artificial Sequence
  synthesized
ugugugggagugggggacaa

SEQ ID NO: 474 - RNA, 20 nt, Artificial Sequence
  synthesized
ugugugggggugggggacaa

SEQ ID NO: 475 - RNA, 20 nt, Artificial Sequence
  synthesized
caauacagagucaguuucuc

SEQ ID NO: 476 - RNA, 20 nt, Artificial Sequence
  synthesized
caauagagagucaguuucuc

SEQ ID NO: 477 - RNA, 20 nt, Artificial Sequence
  synthesized
cgcaauacagagucaguuuc

SEQ ID NO: 478 - RNA, 20 nt, Artificial Sequence
  synthesized
cgcaauagagagucaguuuc

SEQ ID NO: 479 - RNA, 20 nt, Artificial Sequence
  synthesized
cugacucucuauugcgacag

SEQ ID NO: 480 - RNA, 20 nt, Artificial Sequence
  synthesized
cugacucuguauugcgacag

SEQ ID NO: 481 - RNA, 20 nt, Artificial Sequence
  synthesized
gagaaacugacucucuauug

SEQ ID NO: 482 - RNA, 20 nt, Artificial Sequence
  synthesized
gagaaacugacucuguauug

SEQ ID NO: 483 - RNA, 20 nt, Artificial Sequence
  synthesized
ggauguagcugucgcaauag

SEQ ID NO: 484 - RNA, 20 nt, Artificial Sequence
  synthesized
uugagaaacugacucucuau

SEQ ID NO: 485 - RNA, 20 nt, Artificial Sequence
  synthesized
uugagaaacugacucuguau

SEQ ID NO: 486 - RNA, 20 nt, Artificial Sequence
  synthesized
aagcagcuggggagggaagg

SEQ ID NO: 487 - RNA, 20 nt, Artificial Sequence
  synthesized
ccaaggaagcagcuggggag

SEQ ID NO: 488 - RNA, 20 nt, Artificial Sequence
  synthesized
ggaagcagcuggggagggaa

SEQ ID NO: 489 - RNA, 20 nt, Artificial Sequence
  synthesized
ggagggaagggcucaccuag

SEQ ID NO: 490 - RNA, 20 nt, Artificial Sequence
  synthesized
ggggagggaagggcucaccu

SEQ ID NO: 491 - RNA, 20 nt, Artificial Sequence
  synthesized
aagcagcugggcaccuagug

SEQ ID NO: 492 - RNA, 20 nt, Artificial Sequence
  synthesized
aaggaagcagcugggcaccu

SEQ ID NO: 493 - RNA, 20 nt, Artificial Sequence
  synthesized
agcugggcaccuagugggaa

SEQ ID NO: 494 - RNA, 20 nt, Artificial Sequence
  synthesized
cugggcaccuagugggaagg

SEQ ID NO: 495 - RNA, 20 nt, Artificial Sequence
  synthesized
ggaagcagcugggcaccuag

SEQ ID NO: 496 - RNA, 20 nt, Artificial Sequence
  synthesized
aagcccaggaguuuaggacc

SEQ ID NO: 497 - RNA, 20 nt, Artificial Sequence
  synthesized
gagcccaggaguuuaggacc

SEQ ID NO: 498 - RNA, 20 nt, Artificial Sequence
  synthesized
gcagccucgaccucacaggc

SEQ ID NO: 499 - RNA, 20 nt, Artificial Sequence
  synthesized
gcagccuugaccucacaggc

SEQ ID NO: 500 - RNA, 20 nt, Artificial Sequence
  synthesized
aucccagcacuuuaggaggc

SEQ ID NO: 501 - RNA, 20 nt, Artificial Sequence
  synthesized
aucccagcacuuugggaggc

SEQ ID NO: 502 - RNA, 20 nt, Artificial Sequence
  synthesized
cccaaagugcugggauuaca

SEQ ID NO: 503 - RNA, 20 nt, Artificial Sequence
  synthesized
ccuaaagugcugggauuaca

SEQ ID NO: 504 - RNA, 20 nt, Artificial Sequence
  synthesized
cucagccucccaaagugcug

SEQ ID NO: 505 - RNA, 20 nt, Artificial Sequence
  synthesized
cucagccuccuaaagugcug

SEQ ID NO: 506 - RNA, 20 nt, Artificial Sequence
  synthesized
cauguacuggaauaagcccg

SEQ ID NO: 507 - RNA, 20 nt, Artificial Sequence
  synthesized
cauguacuggaauaagccug

SEQ ID NO: 508 - RNA, 20 nt, Artificial Sequence
  synthesized
aaaacauaguucuggaugac

SEQ ID NO: 509 - RNA, 20 nt, Artificial Sequence
  synthesized
aaaacauaguuguggaugac

SEQ ID NO: 510 - RNA, 20 nt, Artificial Sequence
  synthesized
aaagaaaacauaguucugga

SEQ ID NO: 511 - RNA, 20 nt, Artificial Sequence
  synthesized
aaagaaaacauaguugugga

SEQ ID NO: 512 - RNA, 20 nt, Artificial Sequence
  synthesized
gaaaagaaaacauaguucug

SEQ ID NO: 513 - RNA, 20 nt, Artificial Sequence
  synthesized
gaaaagaaaacauaguugug

SEQ ID NO: 514 - RNA, 20 nt, Artificial Sequence
  synthesized
cucgcguuucuacuuccaaa

SEQ ID NO: 515 - RNA, 20 nt, Artificial Sequence
  synthesized
cuugcguuucuacuuccaaa

SEQ ID NO: 516 - RNA, 20 nt, Artificial Sequence
  synthesized
cuuuuggaaguagaaacgca

SEQ ID NO: 517 - RNA, 20 nt, Artificial Sequence
  synthesized
cuuuuggaaguagaaacgcg

SEQ ID NO: 518 - RNA, 20 nt, Artificial Sequence
  synthesized
gaaguagaaacgcaagaaag

SEQ ID NO: 519 - RNA, 20 nt, Artificial Sequence
  synthesized
gaaguagaaacgcgagaaag

SEQ ID NO: 520 - RNA, 20 nt, Artificial Sequence
  synthesized
uggaaguagaaacgcaagaa

SEQ ID NO: 521 - RNA, 20 nt, Artificial Sequence
  synthesized
uggaaguagaaacgcgagaa

SEQ ID NO: 522 - RNA, 20 nt, Artificial Sequence
  synthesized
uucucgcguuucuacuucca

SEQ ID NO: 523 - RNA, 20 nt, Artificial Sequence
  synthesized
uucuugcguuucuacuucca

SEQ ID NO: 524 - RNA, 20 nt, Artificial Sequence
  synthesized
aagguguagcugucuuggau

SEQ ID NO: 525 - RNA, 20 nt, Artificial Sequence
  synthesized
aagguguggcugucuuggau

SEQ ID NO: 526 - RNA, 20 nt, Artificial Sequence
  synthesized
gguguagcugucuuggauuc

SEQ ID NO: 527 - RNA, 20 nt, Artificial Sequence
  synthesized
gguguggcugucuuggauuc

SEQ ID NO: 528 - RNA, 20 nt, Artificial Sequence
  synthesized
uacuaagguguagcugucuu

SEQ ID NO: 529 - RNA, 20 nt, Artificial Sequence
  synthesized
uacuaagguguggcugucuu

SEQ ID NO: 530 - RNA, 20 nt, Artificial Sequence
  synthesized
uagcugucuuggauucagau

SEQ ID NO: 531 - RNA, 20 nt, Artificial Sequence
  synthesized
uggcugucuuggauucagau

SEQ ID NO: 532 - RNA, 20 nt, Artificial Sequence
  synthesized
aagcaucauagcuuaucaga

SEQ ID NO: 533 - RNA, 20 nt, Artificial Sequence
  synthesized
aagcaucguagcuuaucaga

SEQ ID NO: 534 - RNA, 20 nt, Artificial Sequence
  synthesized
auaagcuacgaugcuuggau

SEQ ID NO: 535 - RNA, 20 nt, Artificial Sequence
  synthesized
auaagcuaugaugcuuggau

SEQ ID NO: 536 - RNA, 20 nt, Artificial Sequence
  synthesized
ccaagcaucauagcuuauca

SEQ ID NO: 537 - RNA, 20 nt, Artificial Sequence
  synthesized
ccaagcaucguagcuuauca

SEQ ID NO: 538 - RNA, 20 nt, Artificial Sequence
  synthesized
gcuacgaugcuuggauggga

SEQ ID NO: 539 - RNA, 20 nt, Artificial Sequence
  synthesized
gcuaugaugcuuggauggga

SEQ ID NO: 540 - RNA, 20 nt, Artificial Sequence
  synthesized
uacgaugcuuggaugggaag

SEQ ID NO: 541 - RNA, 20 nt, Artificial Sequence
  synthesized
uaugaugcuuggaugggaag

SEQ ID NO: 542 - RNA, 20 nt, Artificial Sequence
  synthesized
ucugauaagcuacgaugcuu

SEQ ID NO: 543 - RNA, 20 nt, Artificial Sequence
  synthesized
ucugauaagcuaugaugcuu

SEQ ID NO: 544 - RNA, 20 nt, Artificial Sequence
  synthesized
aaagagaaauuugacuuccu

SEQ ID NO: 545 - RNA, 20 nt, Artificial Sequence
  synthesized
agaaauuugacuuccuagca

SEQ ID NO: 546 - RNA, 20 nt, Artificial Sequence
  synthesized
auaaauuugacuuccuagca

SEQ ID NO: 547 - RNA, 20 nt, Artificial Sequence
  synthesized
gaagucaaauuucucuuugu

SEQ ID NO: 548 - RNA, 20 nt, Artificial Sequence
  synthesized
aggcaacauagcuaccaaau

SEQ ID NO: 549 - RNA, 20 nt, Artificial Sequence
  synthesized
aggccacauagcuaccaaau

SEQ ID NO: 550 - RNA, 20 nt, Artificial Sequence
  synthesized
auuugguagcuauguggccu

SEQ ID NO: 551 - RNA, 20 nt, Artificial Sequence
  synthesized
auuugguagcuauguugccu

SEQ ID NO: 552 - RNA, 20 nt, Artificial Sequence
  synthesized
caagugcaguagcgcacacc

SEQ ID NO: 553 - RNA, 20 nt, Artificial Sequence
  synthesized
caggugugcgcuacugcacu

SEQ ID NO: 554 - RNA, 20 nt, Artificial Sequence
  synthesized
ggugugcgcuacugcacuug

SEQ ID NO: 555 - RNA, 20 nt, Artificial Sequence
  synthesized
uacaggugugcgcuacugca

SEQ ID NO: 556 - RNA, 20 nt, Artificial Sequence
  synthesized
agagggaggggccucugaga

SEQ ID NO: 557 - RNA, 20 nt, Artificial Sequence
  synthesized
agagggaugggccucugaga

SEQ ID NO: 558 - RNA, 20 nt, Artificial Sequence
  synthesized
agggaggggccucugagaag

SEQ ID NO: 559 - RNA, 20 nt, Artificial Sequence
  synthesized
agggaugggccucugagaag

SEQ ID NO: 560 - RNA, 20 nt, Artificial Sequence
  synthesized
aucccucuucuccaagucug

SEQ ID NO: 561 - RNA, 20 nt, Artificial Sequence
  synthesized
cagacuuggagaagagggag

SEQ ID NO: 562 - RNA, 20 nt, Artificial Sequence
  synthesized
cagacuuggagaagagggau

SEQ ID NO: 563 - RNA, 20 nt, Artificial Sequence
  synthesized
ccaucccucuucuccaaguc

SEQ ID NO: 564 - RNA, 20 nt, Artificial Sequence
  synthesized
cccucccucuucuccaaguc

SEQ ID NO: 565 - RNA, 20 nt, Artificial Sequence
  synthesized
cucccucuucuccaagucug

SEQ ID NO: 566 - RNA, 20 nt, Artificial Sequence
  synthesized
acccuccgagaguaggaguc

SEQ ID NO: 567 - RNA, 20 nt, Artificial Sequence
  synthesized
acuccuacucuccggagggu

SEQ ID NO: 568 - RNA, 20 nt, Artificial Sequence
  synthesized
ccuccgagaguaggagucug

SEQ ID NO: 569 - RNA, 20 nt, Artificial Sequence
  synthesized
cgagaguaggagucugaggc

SEQ ID NO: 570 - RNA, 20 nt, Artificial Sequence
  synthesized
cucagacuccuacucucgga

SEQ ID NO: 571 - RNA, 20 nt, Artificial Sequence
  synthesized
cucggagggugggcuccugg

SEQ ID NO: 572 - RNA, 20 nt, Artificial Sequence
  synthesized
gacuccuacucucggagggu

SEQ ID NO: 573 - RNA, 20 nt, Artificial Sequence
  synthesized
gagcccacccuccgagagua

SEQ ID NO: 574 - RNA, 20 nt, Artificial Sequence
  synthesized
gagcccacccuccggagagu

SEQ ID NO: 575 - RNA, 20 nt, Artificial Sequence
  synthesized
ucagacuccuacucuccgga

SEQ ID NO: 576 - RNA, 20 nt, Artificial Sequence
  synthesized
uccggagggugggcuccugg

SEQ ID NO: 577 - RNA, 20 nt, Artificial Sequence
  synthesized
acagcacuggauaccgugga

SEQ ID NO: 578 - RNA, 20 nt, Artificial Sequence
  synthesized
agaacagcacuggauaccca

SEQ ID NO: 579 - RNA, 20 nt, Artificial Sequence
  synthesized
cagcacuggauacccaugga

SEQ ID NO: 580 - RNA, 20 nt, Artificial Sequence
  synthesized
cauggaagaaacccuugagu

SEQ ID NO: 581 - RNA, 20 nt, Artificial Sequence
  synthesized
cguggaagaaacccuugagu

SEQ ID NO: 582 - RNA, 20 nt, Artificial Sequence
  synthesized
gagaacagcacuggauaccg

SEQ ID NO: 583 - RNA, 20 nt, Artificial Sequence
  synthesized
gauacccauggaagaaaccc

SEQ ID NO: 584 - RNA, 20 nt, Artificial Sequence
  synthesized
ggauaccguggaagaaaccc

SEQ ID NO: 585 - RNA, 20 nt, Artificial Sequence
  synthesized
ggguuucuuccacgguaucc

SEQ ID NO: 586 - RNA, 20 nt, Artificial Sequence
  synthesized
caacacccccacacuacagu

SEQ ID NO: 587 - RNA, 20 nt, Artificial Sequence
  synthesized
caacacucccacacuacagu

SEQ ID NO: 588 - RNA, 20 nt, Artificial Sequence
  synthesized
ccacuguagugugggagugu

SEQ ID NO: 589 - RNA, 20 nt, Artificial Sequence
  synthesized
ccacuguagugugggggugu

SEQ ID NO: 590 - RNA, 20 nt, Artificial Sequence
  synthesized
gugugggaguguugauagug

SEQ ID NO: 591 - RNA, 20 nt, Artificial Sequence
  synthesized
guguggggguguugauagug

SEQ ID NO: 592 - RNA, 20 nt, Artificial Sequence
  synthesized
uaccacuguagugugggagu

SEQ ID NO: 593 - RNA, 20 nt, Artificial Sequence
  synthesized
uaccacuguagugugggggu

SEQ ID NO: 594 - RNA, 20 nt, Artificial Sequence
  synthesized
uagugugggaguguugauag

SEQ ID NO: 595 - RNA, 20 nt, Artificial Sequence
  synthesized
uaguguggggguguugauag

SEQ ID NO: 596 - RNA, 20 nt, Artificial Sequence
  synthesized
uguagugugggaguguugau

SEQ ID NO: 597 - RNA, 20 nt, Artificial Sequence
  synthesized
uguaguguggggguguugau

SEQ ID NO: 598 - RNA, 20 nt, Artificial Sequence
  synthesized
gauuacggguguaagccaaa

SEQ ID NO: 599 - RNA, 20 nt, Artificial Sequence
  synthesized
gauuauggguguaagccaaa

SEQ ID NO: 600 - RNA, 20 nt, Artificial Sequence
  synthesized
gggauuacggguguaagcca

SEQ ID NO: 601 - RNA, 20 nt, Artificial Sequence
  synthesized
gggauuauggguguaagcca

SEQ ID NO: 602 - RNA, 20 nt, Artificial Sequence
  synthesized
aaguuggguccggacuuuga

SEQ ID NO: 603 - RNA, 20 nt, Artificial Sequence
  synthesized
aaguugggucuggacuuuga

SEQ ID NO: 604 - RNA, 20 nt, Artificial Sequence
  synthesized
cagacccaacuucaaagugu

SEQ ID NO: 605 - RNA, 20 nt, Artificial Sequence
  synthesized
cggacccaacuucaaagugu

SEQ ID NO: 606 - RNA, 20 nt, Artificial Sequence
  synthesized
uccagacccaacuucaaagu

SEQ ID NO: 607 - RNA, 20 nt, Artificial Sequence
  synthesized
uccggacccaacuucaaagu

SEQ ID NO: 608 - RNA, 20 nt, Artificial Sequence
  synthesized
caccagacccccuccccucc

SEQ ID NO: 609 - RNA, 20 nt, Artificial Sequence
  synthesized
cgccagacccccuccccucc

SEQ ID NO: 610 - RNA, 20 nt, Artificial Sequence
  synthesized
cggauuucugggaccagcag

SEQ ID NO: 611 - RNA, 20 nt, Artificial Sequence
  synthesized
cugcuggucccagaaaucca

SEQ ID NO: 612 - RNA, 20 nt, Artificial Sequence
  synthesized
cugcuggucccagaaauccg

SEQ ID NO: 613 - RNA, 20 nt, Artificial Sequence
  synthesized
gagggggucuggcggauuuc

SEQ ID NO: 614 - RNA, 20 nt, Artificial Sequence
  synthesized
gagggggucugguggauuuc

SEQ ID NO: 615 - RNA, 20 nt, Artificial Sequence
  synthesized
gcuggucccagaaauccacc

SEQ ID NO: 616 - RNA, 20 nt, Artificial Sequence
  synthesized
gcuggucccagaaauccgcc

SEQ ID NO: 617 - RNA, 20 nt, Artificial Sequence
  synthesized
ggcggauuucugggaccagc

SEQ ID NO: 618 - RNA, 20 nt, Artificial Sequence
  synthesized
gggggucuggcggauuucug

SEQ ID NO: 619 - RNA, 20 nt, Artificial Sequence
  synthesized
gggggucugguggauuucug

SEQ ID NO: 620 - RNA, 20 nt, Artificial Sequence
  synthesized
gggucuggcggauuucuggg

SEQ ID NO: 621 - RNA, 20 nt, Artificial Sequence
  synthesized
gggucugguggauuucuggg

SEQ ID NO: 622 - RNA, 20 nt, Artificial Sequence
  synthesized
gguggauuucugggaccagc

SEQ ID NO: 623 - RNA, 20 nt, Artificial Sequence
  synthesized
uggauuucugggaccagcag

SEQ ID NO: 624 - RNA, 20 nt, Artificial Sequence
  synthesized
gaaagcuagacugaaccacu

SEQ ID NO: 625 - RNA, 20 nt, Artificial Sequence
  synthesized
gaaagcuagacugaaccauu

SEQ ID NO: 626 - RNA, 20 nt, Artificial Sequence
  synthesized
ucugaguuaaauguuuccaa

SEQ ID NO: 627 - RNA, 20 nt, Artificial Sequence
  synthesized
ucugaguuaaauguuuccag

SEQ ID NO: 628 - RNA, 20 nt, Artificial Sequence
  synthesized
uuccaaugguucagucuagc

SEQ ID NO: 629 - RNA, 20 nt, Artificial Sequence
  synthesized
uuccagugguucagucuagc

SEQ ID NO: 630 - RNA, 20 nt, Artificial Sequence
  synthesized
ucagccaagugauacacuca

SEQ ID NO: 631 - RNA, 20 nt, Artificial Sequence
  synthesized
ucagccgagugauacacuca

SEQ ID NO: 632 - RNA, 20 nt, Artificial Sequence
  synthesized
ucccugaguguaucacucgg

SEQ ID NO: 633 - RNA, 20 nt, Artificial Sequence
  synthesized
ucccugaguguaucacuugg

SEQ ID NO: 634 - RNA, 20 nt, Artificial Sequence
  synthesized
agcccagcccuggguaggag

SEQ ID NO: 635 - RNA, 20 nt, Artificial Sequence
  synthesized
agcccggcccuggguaggag

SEQ ID NO: 636 - RNA, 20 nt, Artificial Sequence
  synthesized
cacuccuacccagggccggg

SEQ ID NO: 637 - RNA, 20 nt, Artificial Sequence
  synthesized
cacuccuacccagggcuggg

SEQ ID NO: 638 - RNA, 20 nt, Artificial Sequence
  synthesized
cagggccgggcuagaccugg

SEQ ID NO: 639 - RNA, 20 nt, Artificial Sequence
  synthesized
cagggcugggcuagaccugg

SEQ ID NO: 640 - RNA, 20 nt, Artificial Sequence
  synthesized
cccagcccuggguaggagug

SEQ ID NO: 641 - RNA, 20 nt, Artificial Sequence
  synthesized
cccagggccgggcuagaccu

SEQ ID NO: 642 - RNA, 20 nt, Artificial Sequence
  synthesized
cccagggcugggcuagaccu

SEQ ID NO: 643 - RNA, 20 nt, Artificial Sequence
  synthesized
ccccaggucuagcccagccc

SEQ ID NO: 644 - RNA, 20 nt, Artificial Sequence
  synthesized
ccccaggucuagcccggccc

SEQ ID NO: 645 - RNA, 20 nt, Artificial Sequence
  synthesized
cccggcccuggguaggagug

SEQ ID NO: 646 - RNA, 20 nt, Artificial Sequence
  synthesized
cuagcccagcccuggguagg

SEQ ID NO: 647 - RNA, 20 nt, Artificial Sequence
  synthesized
cuagcccggcccuggguagg

SEQ ID NO: 648 - RNA, 20 nt, Artificial Sequence
  synthesized
cuccuacccagggccgggcu

SEQ ID NO: 649 - RNA, 20 nt, Artificial Sequence
  synthesized
cuccuacccagggcugggcu

SEQ ID NO: 650 - RNA, 20 nt, Artificial Sequence
  synthesized
gucuagcccagcccugggua

SEQ ID NO: 651 - RNA, 20 nt, Artificial Sequence
  synthesized
gucuagcccggcccugggua

SEQ ID NO: 652 - RNA, 20 nt, Artificial Sequence
  synthesized
cuuuaaaaaaaguuagggcc

SEQ ID NO: 653 - RNA, 20 nt, Artificial Sequence
  synthesized
uuuuaaaaaaaguuagggcc

SEQ ID NO: 654 - RNA, 20 nt, Artificial Sequence
  synthesized
caggagcggcccugggcugg

SEQ ID NO: 655 - RNA, 20 nt, Artificial Sequence
  synthesized
caggaggggcccugggcugg

SEQ ID NO: 656 - RNA, 20 nt, Artificial Sequence
  synthesized
ccagcccagggccccuccug

SEQ ID NO: 657 - RNA, 20 nt, Artificial Sequence
  synthesized
ccagcccagggccgcuccug

SEQ ID NO: 658 - RNA, 20 nt, Artificial Sequence
  synthesized
cccagggccccuccugaggc

SEQ ID NO: 659 - RNA, 20 nt, Artificial Sequence
  synthesized
cccagggccgcuccugaggc

SEQ ID NO: 660 - RNA, 20 nt, Artificial Sequence
  synthesized
ccccagcccagggccccucc

SEQ ID NO: 661 - RNA, 20 nt, Artificial Sequence
  synthesized
ccccagcccagggccgcucc

SEQ ID NO: 662 - RNA, 20 nt, Artificial Sequence
  synthesized
cggcccugggcuggggaaaa

SEQ ID NO: 663 - RNA, 20 nt, Artificial Sequence
  synthesized
cucaggagcggcccugggcu

SEQ ID NO: 664 - RNA, 20 nt, Artificial Sequence
  synthesized
cucaggaggggcccugggcu

SEQ ID NO: 665 - RNA, 20 nt, Artificial Sequence
  synthesized
gggcccugggcuggggaaaa

SEQ ID NO: 666 - RNA, 20 nt, Artificial Sequence
  synthesized
ucaggccucaggagcggccc

SEQ ID NO: 667 - RNA, 20 nt, Artificial Sequence
  synthesized
ucaggccucaggaggggccc

SEQ ID NO: 668 - RNA, 20 nt, Artificial Sequence
  synthesized
aauacguacaggcaggaauc

SEQ ID NO: 669 - RNA, 20 nt, Artificial Sequence
  synthesized
augaauacguacaggcagaa

SEQ ID NO: 670 - RNA, 20 nt, Artificial Sequence
  synthesized
augaauacguacaggcagga

SEQ ID NO: 671 - RNA, 20 nt, Artificial Sequence
  synthesized
gauuccugccuguacguauu

SEQ ID NO: 672 - RNA, 20 nt, Artificial Sequence
  synthesized
gccuaaucugauuccugccu

SEQ ID NO: 673 - RNA, 20 nt, Artificial Sequence
  synthesized
gccuaaucugauuucugccu

SEQ ID NO: 674 - RNA, 20 nt, Artificial Sequence
  synthesized
guacaggcagaaaucagauu

SEQ ID NO: 675 - RNA, 20 nt, Artificial Sequence
  synthesized
guacaggcaggaaucagauu

SEQ ID NO: 676 - RNA, 20 nt, Artificial Sequence
  synthesized
ucugauuccugccuguacgu

SEQ ID NO: 677 - RNA, 20 nt, Artificial Sequence
  synthesized
ucugauuucugccuguacgu

SEQ ID NO: 678 - RNA, 20 nt, Artificial Sequence
  synthesized
cugauccugaccagugaacc

SEQ ID NO: 679 - RNA, 20 nt, Artificial Sequence
  synthesized
cugaucuugaccagugaacc

SEQ ID NO: 680 - RNA, 20 nt, Artificial Sequence
  synthesized
cugguucacuggucaagauc

SEQ ID NO: 681 - RNA, 20 nt, Artificial Sequence
  synthesized
cugguucacuggucaggauc

SEQ ID NO: 682 - RNA, 20 nt, Artificial Sequence
  synthesized
ggucugcacugauccugacc

SEQ ID NO: 683 - RNA, 20 nt, Artificial Sequence
  synthesized
ggucugcacugaucuugacc

SEQ ID NO: 684 - RNA, 20 nt, Artificial Sequence
  synthesized
ucaagaucagugcagaccac

SEQ ID NO: 685 - RNA, 20 nt, Artificial Sequence
  synthesized
ucaggaucagugcagaccac

SEQ ID NO: 686 - RNA, 20 nt, Artificial Sequence
  synthesized
ucugcacugauccugaccag

SEQ ID NO: 687 - RNA, 20 nt, Artificial Sequence
  synthesized
ucugcacugaucuugaccag

SEQ ID NO: 688 - RNA, 20 nt, Artificial Sequence
  synthesized
accacugguguauacacagg

SEQ ID NO: 689 - RNA, 20 nt, Artificial Sequence
  synthesized
agugggauacuaauccaguc

SEQ ID NO: 690 - RNA, 20 nt, Artificial Sequence
  synthesized
agugguauacuaauccaguc

SEQ ID NO: 691 - RNA, 20 nt, Artificial Sequence
  synthesized
auaccacugguguauacaca

SEQ ID NO: 692 - RNA, 20 nt, Artificial Sequence
  synthesized
aucccacugguguauacaca

SEQ ID NO: 693 - RNA, 20 nt, Artificial Sequence
  synthesized
caccagugggauacuaaucc

SEQ ID NO: 694 - RNA, 20 nt, Artificial Sequence
  synthesized
caccagugguauacuaaucc

SEQ ID NO: 695 - RNA, 20 nt, Artificial Sequence
  synthesized
cccacugguguauacacagg

SEQ ID NO: 696 - RNA, 20 nt, Artificial Sequence
  synthesized
gacuggauuaguauaccacu

SEQ ID NO: 697 - RNA, 20 nt, Artificial Sequence
  synthesized
gacuggauuaguaucccacu

SEQ ID NO: 698 - RNA, 20 nt, Artificial Sequence
  synthesized
ugggauacuaauccagucgu

SEQ ID NO: 699 - RNA, 20 nt, Artificial Sequence
  synthesized
ugguauacuaauccagucgu

SEQ ID NO: 700 - RNA, 20 nt, Artificial Sequence
  synthesized
uguguauacaccagugggau

SEQ ID NO: 701 - RNA, 20 nt, Artificial Sequence
  synthesized
uguguauacaccagugguau

SEQ ID NO: 702 - RNA, 20 nt, Artificial Sequence
  synthesized
cauccuguauaauuucaagu

SEQ ID NO: 703 - RNA, 20 nt, Artificial Sequence
  synthesized
ggcagacauccuguauaauu

SEQ ID NO: 704 - RNA, 20 nt, Artificial Sequence
  synthesized
ggcagauauccuguauaauu

SEQ ID NO: 705 - RNA, 20 nt, Artificial Sequence
  synthesized
agcuccucuuguguucucgu

SEQ ID NO: 706 - RNA, 20 nt, Artificial Sequence
  synthesized
agcuccucuuguguucuugu

SEQ ID NO: 707 - RNA, 20 nt, Artificial Sequence
  synthesized
ccucuuguguucucguagaa

SEQ ID NO: 708 - RNA, 20 nt, Artificial Sequence
  synthesized
ccucuuguguucuuguagaa

SEQ ID NO: 709 - RNA, 20 nt, Artificial Sequence
  synthesized
ccuucuacaagaacacaaga

SEQ ID NO: 710 - RNA, 20 nt, Artificial Sequence
  synthesized
ccuucuacgagaacacaaga

SEQ ID NO: 711 - RNA, 20 nt, Artificial Sequence
  synthesized
uuauugagcgccuucuacaa

SEQ ID NO: 712 - RNA, 20 nt, Artificial Sequence
  synthesized
uuauugagcgccuucuacga

SEQ ID NO: 713 - RNA, 20 nt, Artificial Sequence
  synthesized
uuguguucucguagaaggcg

SEQ ID NO: 714 - RNA, 20 nt, Artificial Sequence
  synthesized
uuguguucuuguagaaggcg

SEQ ID NO: 715 - RNA, 20 nt, Artificial Sequence
  synthesized
auauccgucagguuaaacuc

SEQ ID NO: 716 - RNA, 20 nt, Artificial Sequence
  synthesized
uaucucaagugaggaggaaa

SEQ ID NO: 717 - RNA, 20 nt, Artificial Sequence
  synthesized
cuccugaggagcuggguggg

SEQ ID NO: 718 - RNA, 20 nt, Artificial Sequence
  synthesized
aaagaagggugacggcuugg

SEQ ID NO: 719 - RNA, 20 nt, Artificial Sequence
  synthesized
agaagggugacggcuuggga

SEQ ID NO: 720 - RNA, 20 nt, Artificial Sequence
  synthesized
aguagacccuaguaccucac

SEQ ID NO: 721 - RNA, 20 nt, Artificial Sequence
  synthesized
uagacccuaguaccucacca

SEQ ID NO: 722 - RNA, 20 nt, Artificial Sequence
  synthesized
ccuuguucugacuugcacac

SEQ ID NO: 723 - RNA, 20 nt, Artificial Sequence
  synthesized
guuaacagagccccuaaguc

SEQ ID NO: 724 - RNA, 20 nt, Artificial Sequence
  synthesized
uaacagagccccuaagucac

SEQ ID NO: 725 - RNA, 20 nt, Artificial Sequence
  synthesized
uuguucugacuugcacacuu

SEQ ID NO: 726 - RNA, 20 nt, Artificial Sequence
  synthesized
ccuugccaccuguguguggu

SEQ ID NO: 727 - RNA, 20 nt, Artificial Sequence
  synthesized
uugccaccugugugugguga

SEQ ID NO: 728 - RNA, 20 nt, Artificial Sequence
  synthesized
ugagcagauuacaagaaggg

SEQ ID NO: 729 - RNA, 20 nt, Artificial Sequence
  synthesized
gugggcaccugugugucugu

SEQ ID NO: 730 - RNA, 20 nt, Artificial Sequence
  synthesized
gugugggcaccugugugucu

SEQ ID NO: 731 - RNA, 20 nt, Artificial Sequence
  synthesized
agcugcuauauggcgaguuc

SEQ ID NO: 732 - RNA, 20 nt, Artificial Sequence
  synthesized
caagcugcuauauggcgagu

SEQ ID NO: 733 - RNA, 20 nt, Artificial Sequence
  synthesized
guaguagcagagcaggaaga

SEQ ID NO: 734 - RNA, 20 nt, Artificial Sequence
  synthesized
cugcagguucucccacccac

SEQ ID NO: 735 - RNA, 20 nt, Artificial Sequence
  synthesized
uucugcagguucucccaccc

SEQ ID NO: 736 - RNA, 20 nt, Artificial Sequence
  synthesized
caaggucauugcgaaauagu

SEQ ID NO: 737 - RNA, 20 nt, Artificial Sequence
  synthesized
uucaaggucauugcgaaaua

SEQ ID NO: 738 - RNA, 20 nt, Artificial Sequence
  synthesized
aacauagggagauccugauc

SEQ ID NO: 739 - RNA, 20 nt, Artificial Sequence
  synthesized
aaaagauucugcaaccccac

SEQ ID NO: 740 - RNA, 20 nt, Artificial Sequence
  synthesized
aagauucugcaaccccaccu

SEQ ID NO: 741 - RNA, 20 nt, Artificial Sequence
  synthesized
cccugagggucuuccgagag

SEQ ID NO: 742 - RNA, 20 nt, Artificial Sequence
  synthesized
caugggaguggggcugaggg

SEQ ID NO: 743 - RNA, 20 nt, Artificial Sequence
  synthesized
gcuacuacagugccccacag

SEQ ID NO: 744 - RNA, 20 nt, Artificial Sequence
  synthesized
uacuacagugccccacagac

SEQ ID NO: 745 - RNA, 20 nt, Artificial Sequence
  synthesized
aagaaagaaaaggagggggc

SEQ ID NO: 746 - RNA, 20 nt, Artificial Sequence
  synthesized
accccuguccagcuaugcca

SEQ ID NO: 747 - RNA, 20 nt, Artificial Sequence
  synthesized
ccaagaaagaaaaggagggg

SEQ ID NO: 748 - RNA, 20 nt, Artificial Sequence
  synthesized
gcaccccuguccagcuaugc

SEQ ID NO: 749 - RNA, 20 nt, Artificial Sequence
  synthesized
gccaagaaagaaaaggaggg

SEQ ID NO: 750 - RNA, 20 nt, Artificial Sequence
  synthesized
acccccaccagacucacccc

SEQ ID NO: 751 - RNA, 20 nt, Artificial Sequence
  synthesized
caacccccaccagacucacc

SEQ ID NO: 752 - RNA, 20 nt, Artificial Sequence
  synthesized
gaagccugccggggcuggug

SEQ ID NO: 753 - RNA, 20 nt, Artificial Sequence
  synthesized
gggugcuccaucaaggcccc

SEQ ID NO: 754 - RNA, 20 nt, Artificial Sequence
  synthesized
gugcuccaucaaggccccau

SEQ ID NO: 755 - RNA, 20 nt, Artificial Sequence
  synthesized
acaguggucaggcaggaagg

SEQ ID NO: 756 - RNA, 20 nt, Artificial Sequence
  synthesized
aguggucaggcaggaagggc

SEQ ID NO: 757 - RNA, 20 nt, Artificial Sequence
  synthesized
ugcuauuuccacaccccaug

SEQ ID NO: 758 - RNA, 20 nt, Artificial Sequence
  synthesized
acguuccacugcaucacuga

SEQ ID NO: 759 - RNA, 20 nt, Artificial Sequence
  synthesized
guuccacugcaucacugauc

SEQ ID NO: 760 - RNA, 20 nt, Artificial Sequence
  synthesized
ugcuacucgaaggacagccu

SEQ ID NO: 761 - RNA, 20 nt, Artificial Sequence
  synthesized
uuugcuacucgaaggacagc

SEQ ID NO: 762 - RNA, 20 nt, Artificial Sequence
  synthesized
accuuguauccagaguuuga

SEQ ID NO: 763 - RNA, 20 nt, Artificial Sequence
  synthesized
auggagggagcucaaaccca

SEQ ID NO: 764 - RNA, 20 nt, Artificial Sequence
  synthesized
ggagggagcucaaacccaag

SEQ ID NO: 765 - RNA, 20 nt, Artificial Sequence
  synthesized
guaccuuguauccagaguuu

SEQ ID NO: 766 - RNA, 20 nt, Artificial Sequence
  synthesized
uuaaagagagguuggccggg

SEQ ID NO: 767 - RNA, 20 nt, Artificial Sequence
  synthesized
aaagagagguuggccgggug

SEQ ID NO: 768 - RNA, 20 nt, Artificial Sequence
  synthesized
acugcacccggccaaccucu

SEQ ID NO: 769 - RNA, 20 nt, Artificial Sequence
  synthesized
agagagguuggccgggugca

SEQ ID NO: 770 - RNA, 20 nt, Artificial Sequence
  synthesized
agagguuggccgggugcagu

SEQ ID NO: 771 - RNA, 20 nt, Artificial Sequence
  synthesized
agccacugcacccggccaac

SEQ ID NO: 772 - RNA, 20 nt, Artificial Sequence
  synthesized
cacccggccaaccucucuuu

SEQ ID NO: 773 - RNA, 20 nt, Artificial Sequence
  synthesized
ccacugcacccggccaaccu

SEQ ID NO: 774 - RNA, 20 nt, Artificial Sequence
  synthesized
ugcacccggccaaccucucu

SEQ ID NO: 775 - RNA, 20 nt, Artificial Sequence
  synthesized
cacagggauccuagggaagu

SEQ ID NO: 776 - RNA, 20 nt, Artificial Sequence
  synthesized
cagggauccuagggaagugu

SEQ ID NO: 777 - RNA, 20 nt, Artificial Sequence
  synthesized
ccaugguagaggggguguug

SEQ ID NO: 778 - RNA, 20 nt, Artificial Sequence
  synthesized
ggccaugguagagggggugu

SEQ ID NO: 779 - RNA, 20 nt, Artificial Sequence
  synthesized
cccgauacucagccucagac

SEQ ID NO: 780 - RNA, 20 nt, Artificial Sequence
  synthesized
cucccgauacucagccucag

SEQ ID NO: 781 - RNA, 20 nt, Artificial Sequence
  synthesized
auccacuugccuccacaccc

SEQ ID NO: 782 - RNA, 20 nt, Artificial Sequence
  synthesized
uuuaagaaucuugucuuggg

SEQ ID NO: 783 - RNA, 20 nt, Artificial Sequence
  synthesized
acgaaggaaauggggaugag

SEQ ID NO: 784 - RNA, 20 nt, Artificial Sequence
  synthesized
ccccugcccuuuagaaggca

SEQ ID NO: 785 - RNA, 20 nt, Artificial Sequence
  synthesized
ccugcccuuuagaaggcaga

SEQ ID NO: 786 - RNA, 20 nt, Artificial Sequence
  synthesized
gaauaaggagagguggugcc

SEQ ID NO: 787 - RNA, 20 nt, Artificial Sequence
  synthesized
uugaauaaggagagguggug

SEQ ID NO: 788 - RNA, 20 nt, Artificial Sequence
  synthesized
cacccugauccuuugaaugc

SEQ ID NO: 789 - RNA, 20 nt, Artificial Sequence
  synthesized
gacacccugauccuuugaau

SEQ ID NO: 790 - RNA, 20 nt, Artificial Sequence
  synthesized
uuuaaacaacugacccuugg

SEQ ID NO: 791 - RNA, 20 nt, Artificial Sequence
  synthesized
cuguuacccaggcucaaggg

SEQ ID NO: 792 - RNA, 20 nt, Artificial Sequence
  synthesized
guuacccaggcucaagggca

SEQ ID NO: 793 - RNA, 20 nt, Artificial Sequence
  synthesized
accuaacgucuaacuucagu

SEQ ID NO: 794 - RNA, 20 nt, Artificial Sequence
  synthesized
cuaacgucuaacuucaguuu

SEQ ID NO: 795 - RNA, 20 nt, Artificial Sequence
  synthesized
gguggagccaggaguggggu

SEQ ID NO: 796 - RNA, 20 nt, Artificial Sequence
  synthesized
uggagccaggaguggggugu

SEQ ID NO: 797 - RNA, 20 nt, Artificial Sequence
  synthesized
aaacagaguguuugggacgg

SEQ ID NO: 798 - RNA, 20 nt, Artificial Sequence
  synthesized
acagaguguuugggacgggc

SEQ ID NO: 799 - RNA, 20 nt, Artificial Sequence
  synthesized
aaccuuguuuccuguggacc

SEQ ID NO: 800 - RNA, 20 nt, Artificial Sequence
  synthesized
ccuuguuuccuguggaccac

SEQ ID NO: 801 - RNA, 20 nt, Artificial Sequence
  synthesized
cugccgcagagugggaaggg

SEQ ID NO: 802 - RNA, 20 nt, Artificial Sequence
  synthesized
ggcugccgcagagugggaag

SEQ ID NO: 803 - RNA, 20 nt, Artificial Sequence
  synthesized
accuagcccuuugcuaccac

SEQ ID NO: 804 - RNA, 20 nt, Artificial Sequence
  synthesized
agcccuuugcuaccacaucc

SEQ ID NO: 805 - RNA, 20 nt, Artificial Sequence
  synthesized
aggaggaggaggauguggua

SEQ ID NO: 806 - RNA, 20 nt, Artificial Sequence
  synthesized
aggaggaugugguagcaaag

SEQ ID NO: 807 - RNA, 20 nt, Artificial Sequence
  synthesized
augugguagcaaagggcuag

SEQ ID NO: 808 - RNA, 20 nt, Artificial Sequence
  synthesized
ccaccuagcccuuugcuacc

SEQ ID NO: 809 - RNA, 20 nt, Artificial Sequence
  synthesized
cccuuugcuaccacauccuc

SEQ ID NO: 810 - RNA, 20 nt, Artificial Sequence
  synthesized
cuagcccuuugcuaccacau

SEQ ID NO: 811 - RNA, 20 nt, Artificial Sequence
  synthesized
cuuugcuaccacauccuccu

SEQ ID NO: 812 - RNA, 20 nt, Artificial Sequence
  synthesized
gaggaggaggaugugguagc

SEQ ID NO: 813 - RNA, 20 nt, Artificial Sequence
  synthesized
gaggaugugguagcaaaggg

SEQ ID NO: 814 - RNA, 20 nt, Artificial Sequence
  synthesized
gcuaccacauccuccuccuc

SEQ ID NO: 815 - RNA, 20 nt, Artificial Sequence
  synthesized
ggaggaggaggaggaugugg

SEQ ID NO: 816 - RNA, 20 nt, Artificial Sequence
  synthesized
uaccacauccuccuccuccu

SEQ ID NO: 817 - RNA, 20 nt, Artificial Sequence
  synthesized
uugcuaccacauccuccucc

SEQ ID NO: 818 - RNA, 20 nt, Artificial Sequence
  synthesized
cugacucuuuuucagcaugc

SEQ ID NO: 819 - RNA, 20 nt, Artificial Sequence
  synthesized
ucuuugguuuuuacuugggc

SEQ ID NO: 820 - RNA, 20 nt, Artificial Sequence
  synthesized
uuugguuuuuacuugggcac

SEQ ID NO: 821 - RNA, 20 nt, Artificial Sequence
  synthesized
accaggcccugguaccugga

SEQ ID NO: 822 - RNA, 20 nt, Artificial Sequence
  synthesized
cccugggcucgcccccaccu

SEQ ID NO: 823 - RNA, 20 nt, Artificial Sequence
  synthesized
cugggcucgcccccaccucu

SEQ ID NO: 824 - RNA, 20 nt, Artificial Sequence
  synthesized
guaccaggcccugguaccug

SEQ ID NO: 825 - RNA, 20 nt, Artificial Sequence
  synthesized
caaugcacacgccuaucuac

SEQ ID NO: 826 - RNA, 20 nt, Artificial Sequence
  synthesized
ccuuugcuuuggcagggaag

SEQ ID NO: 827 - RNA, 20 nt, Artificial Sequence
  synthesized
ggcaaugcacacgccuaucu

SEQ ID NO: 828 - RNA, 20 nt, Artificial Sequence
  synthesized
caacagccugaaucaaaugg

SEQ ID NO: 829 - RNA, 20 nt, Artificial Sequence
  synthesized
uacaacagccugaaucaaau

SEQ ID NO: 830 - RNA, 20 nt, Artificial Sequence
  synthesized
acugaacaacggcacuuaag

SEQ ID NO: 831 - RNA, 20 nt, Artificial Sequence
  synthesized
auccaggcuaucuuccagau

SEQ ID NO: 832 - RNA, 20 nt, Artificial Sequence
  synthesized
cuauccaggcuaucuuccag

SEQ ID NO: 833 - RNA, 20 nt, Artificial Sequence
  synthesized
cacccugagcucaggcagcc

SEQ ID NO: 834 - RNA, 20 nt, Artificial Sequence
  synthesized
cuccacccugagcucaggca

SEQ ID NO: 835 - RNA, 20 nt, Artificial Sequence
  synthesized
uccacccugagcucaggcag

SEQ ID NO: 836 - RNA, 20 nt, Artificial Sequence
  synthesized
uuacuccguccuucagggau

SEQ ID NO: 837 - RNA, 20 nt, Artificial Sequence
  synthesized
uuuacuccguccuucaggga

SEQ ID NO: 838 - RNA, 20 nt, Artificial Sequence
  synthesized
caccagccccggcaggcuuc

SEQ ID NO: 839 - RNA, 20 nt, Artificial Sequence
  synthesized
ccagccccggcaggcuucuc

SEQ ID NO: 840 - RNA, 20 nt, Artificial Sequence
  synthesized
uaaguugcuucagagagaug

SEQ ID NO: 841 - RNA, 20 nt, Artificial Sequence
  synthesized
auacaaugacaaaggcagua

SEQ ID NO: 842 - RNA, 20 nt, Artificial Sequence
  synthesized
cugccuuugucauuguauua

SEQ ID NO: 843 - RNA, 20 nt, Artificial Sequence
  synthesized
cuguuacugccuuugucauu

SEQ ID NO: 844 - RNA, 20 nt, Artificial Sequence
  synthesized
gccuuugucauuguauuauu

SEQ ID NO: 845 - RNA, 20 nt, Artificial Sequence
  synthesized
guuacugccuuugucauugu

SEQ ID NO: 846 - RNA, 20 nt, Artificial Sequence
  synthesized
uaauacaaugacaaaggcag

SEQ ID NO: 847 - RNA, 20 nt, Artificial Sequence
  synthesized
uacugccuuugucauuguau

SEQ ID NO: 848 - RNA, 20 nt, Artificial Sequence
  synthesized
cacugugacacacacacaca

SEQ ID NO: 849 - RNA, 20 nt, Artificial Sequence
  synthesized
cccuuccugucacugugaca

SEQ ID NO: 850 - RNA, 20 nt, Artificial Sequence
  synthesized
cugucacugugacacacaca

SEQ ID NO: 851 - RNA, 20 nt, Artificial Sequence
  synthesized
cuuccugucacugugacaca

SEQ ID NO: 852 - RNA, 20 nt, Artificial Sequence
  synthesized
gucacugugacacacacaca

SEQ ID NO: 853 - RNA, 20 nt, Artificial Sequence
  synthesized
ucacagugacaggaagggca

SEQ ID NO: 854 - RNA, 20 nt, Artificial Sequence
  synthesized
uccugucacugugacacaca

SEQ ID NO: 855 - RNA, 20 nt, Artificial Sequence
  synthesized
ucucugcccuuccugucacu

SEQ ID NO: 856 - RNA, 20 nt, Artificial Sequence
  synthesized
ucugcccuuccugucacugu

SEQ ID NO: 857 - RNA, 20 nt, Artificial Sequence
  synthesized
ugcccuuccugucacuguga

SEQ ID NO: 858 - RNA, 20 nt, Artificial Sequence
  synthesized
ugucacagugacaggaaggg

SEQ ID NO: 859 - RNA, 20 nt, Artificial Sequence
  synthesized
ugugucacagugacaggaag

SEQ ID NO: 860 - RNA, 20 nt, Artificial Sequence
  synthesized
ugugugugucacagugacag

SEQ ID NO: 861 - RNA, 20 nt, Artificial Sequence
  synthesized
ugugugugugugucacagug

SEQ ID NO: 862 - RNA, 20 nt, Artificial Sequence
  synthesized
cucuguauugcgacagcuac

SEQ ID NO: 863 - RNA, 20 nt, Artificial Sequence
  synthesized
cuguauugcgacagcuacau

SEQ ID NO: 864 - RNA, 20 nt, Artificial Sequence
  synthesized
agcuggauguagcugucgca

SEQ ID NO: 865 - RNA, 20 nt, Artificial Sequence
  synthesized
guauugcgacagcuacaucc

SEQ ID NO: 866 - RNA, 20 nt, Artificial Sequence
  synthesized
auguuugagaaacugacucu

SEQ ID NO: 867 - RNA, 20 nt, Artificial Sequence
  synthesized
ugauguuugagaaacugacu

SEQ ID NO: 868 - RNA, 20 nt, Artificial Sequence
  synthesized
uagccucuaggugagcccuu

SEQ ID NO: 869 - RNA, 20 nt, Artificial Sequence
  synthesized
gccucuaggugagcccuucc

SEQ ID NO: 870 - RNA, 20 nt, Artificial Sequence
  synthesized
aaggaagcagcugggguggg

SEQ ID NO: 871 - RNA, 20 nt, Artificial Sequence
  synthesized
agcuggggugggaagggcuc

SEQ ID NO: 872 - RNA, 20 nt, Artificial Sequence
  synthesized
aggugagcccuucccacccc

SEQ ID NO: 873 - RNA, 20 nt, Artificial Sequence
  synthesized
caccccagcugcuuccuugg

SEQ ID NO: 874 - RNA, 20 nt, Artificial Sequence
  synthesized
cccaccccagcugcuuccuu

SEQ ID NO: 875 - RNA, 20 nt, Artificial Sequence
  synthesized
ccuucccaccccagcugcuu

SEQ ID NO: 876 - RNA, 20 nt, Artificial Sequence
  synthesized
cuaggugagcccuucccacc

SEQ ID NO: 877 - RNA, 20 nt, Artificial Sequence
  synthesized
cucuaggugagcccuuccca

SEQ ID NO: 878 - RNA, 20 nt, Artificial Sequence
  synthesized
cuggggugggaagggcucac

SEQ ID NO: 879 - RNA, 20 nt, Artificial Sequence
  synthesized
gagcccuucccaccccagcu

SEQ ID NO: 880 - RNA, 20 nt, Artificial Sequence
  synthesized
gcagcuggggugggaagggc

SEQ ID NO: 881 - RNA, 20 nt, Artificial Sequence
  synthesized
gcccuucccaccccagcugc

SEQ ID NO: 882 - RNA, 20 nt, Artificial Sequence
  synthesized
gugagcccuucccaccccag

SEQ ID NO: 883 - RNA, 20 nt, Artificial Sequence
  synthesized
uucccaccccagcugcuucc

SEQ ID NO: 884 - RNA, 20 nt, Artificial Sequence
  synthesized
cucagguccuaaacuccugg

SEQ ID NO: 885 - RNA, 20 nt, Artificial Sequence
  synthesized
gauggcugaagccugugagg

SEQ ID NO: 886 - RNA, 20 nt, Artificial Sequence
  synthesized
uggcugaagccugugagguc

SEQ ID NO: 887 - RNA, 20 nt, Artificial Sequence
  synthesized
cggacauguacuggaauaag

SEQ ID NO: 888 - RNA, 20 nt, Artificial Sequence
  synthesized
gcuguguaggggggcugugg

SEQ ID NO: 889 - RNA, 20 nt, Artificial Sequence
  synthesized
aggaccuggcucuugucauc

SEQ ID NO: 890 - RNA, 20 nt, Artificial Sequence
  synthesized
gaccuggcucuugucaucca

SEQ ID NO: 891 - RNA, 20 nt, Artificial Sequence
  synthesized
gcagccucugggcucacuuu

SEQ ID NO: 892 - RNA, 20 nt, Artificial Sequence
  synthesized
cuaucugaauccaagacagc

SEQ ID NO: 893 - RNA, 20 nt, Artificial Sequence
  synthesized
uucuaucugaauccaagaca

SEQ ID NO: 894 - RNA, 20 nt, Artificial Sequence
  synthesized
aacuauguuuucugauaagc

SEQ ID NO: 895 - RNA, 20 nt, Artificial Sequence
  synthesized
cuuccacuucccauccaagc

SEQ ID NO: 896 - RNA, 20 nt, Artificial Sequence
  synthesized
uccacuucccauccaagcau

SEQ ID NO: 897 - RNA, 20 nt, Artificial Sequence
  synthesized
cuguugcuaggaagucaaau

SEQ ID NO: 898 - RNA, 20 nt, Artificial Sequence
  synthesized
guugcuaggaagucaaauuu

SEQ ID NO: 899 - RNA, 20 nt, Artificial Sequence
  synthesized
gagagaguaaguuguccaag

SEQ ID NO: 900 - RNA, 20 nt, Artificial Sequence
  synthesized
gagaguaaguuguccaaggc

SEQ ID NO: 901 - RNA, 20 nt, Artificial Sequence
  synthesized
ugguuggucaagugcaguag

SEQ ID NO: 902 - RNA, 20 nt, Artificial Sequence
  synthesized
gguggucccuucucagaggc

SEQ ID NO: 903 - RNA, 20 nt, Artificial Sequence
  synthesized
uggucccuucucagaggccc

SEQ ID NO: 904 - RNA, 20 nt, Artificial Sequence
  synthesized
cggagggugggcuccuggcc

SEQ ID NO: 905 - RNA, 20 nt, Artificial Sequence
  synthesized
gcgaggccaggagcccaccc

SEQ ID NO: 906 - RNA, 20 nt, Artificial Sequence
  synthesized
agcgagaacagcacuggaua

SEQ ID NO: 907 - RNA, 20 nt, Artificial Sequence
  synthesized
ccagccuccccacuaucaac

SEQ ID NO: 908 - RNA, 20 nt, Artificial Sequence
  synthesized
aggcccuuuggcuuacaccc

SEQ ID NO: 909 - RNA, 20 nt, Artificial Sequence
  synthesized
cuaggcccuuuggcuuacac

SEQ ID NO: 910 - RNA, 20 nt, Artificial Sequence
  synthesized
guccacacuuugaaguuggg

SEQ ID NO: 911 - RNA, 20 nt, Artificial Sequence
  synthesized
uagaacuuggcacuucaaag

SEQ ID NO: 912 - RNA, 20 nt, Artificial Sequence
  synthesized
cccccugcuggucccagaaa

SEQ ID NO: 913 - RNA, 20 nt, Artificial Sequence
  synthesized
cccugcuggucccagaaauc

SEQ ID NO: 914 - RNA, 20 nt, Artificial Sequence
  synthesized
agagucugaguuaaauguuu

SEQ ID NO: 915 - RNA, 20 nt, Artificial Sequence
  synthesized
cugugaaagcuagacugaac

SEQ ID NO: 916 - RNA, 20 nt, Artificial Sequence
  synthesized
gugaaagcuagacugaacca

SEQ ID NO: 917 - RNA, 20 nt, Artificial Sequence
  synthesized
agauaaaggcagugacucag

SEQ ID NO: 918 - RNA, 20 nt, Artificial Sequence
  synthesized
auaaaggcagugacucagcc

SEQ ID NO: 919 - RNA, 20 nt, Artificial Sequence
  synthesized
cagcugucccugaguguauc

SEQ ID NO: 920 - RNA, 20 nt, Artificial Sequence
  synthesized
gcugucccugaguguaucac

SEQ ID NO: 921 - RNA, 20 nt, Artificial Sequence
  synthesized
cagucccacuccuacccagg

SEQ ID NO: 922 - RNA, 20 nt, Artificial Sequence
  synthesized
cuggcccuaacuuuuuuuaa

SEQ ID NO: 923 - RNA, 20 nt, Artificial Sequence
  synthesized
ggcuggcccuaacuuuuuuu

SEQ ID NO: 924 - RNA, 20 nt, Artificial Sequence
  synthesized
uuuacuagggcaccaaggua

SEQ ID NO: 925 - RNA, 20 nt, Artificial Sequence
  synthesized
uuuuuacuagggcaccaagg

SEQ ID NO: 926 - RNA, 20 nt, Artificial Sequence
  synthesized
cacauuuuccccagcccagg

SEQ ID NO: 927 - RNA, 20 nt, Artificial Sequence
  synthesized
cauuuuccccagcccagggc

SEQ ID NO: 928 - RNA, 20 nt, Artificial Sequence
  synthesized
agaacugagccuaaucugau

SEQ ID NO: 929 - RNA, 20 nt, Artificial Sequence
  synthesized
ccagaacugagccuaaucug

SEQ ID NO: 930 - RNA, 20 nt, Artificial Sequence
  synthesized
cuaugaauacguacaggcag

SEQ ID NO: 931 - RNA, 20 nt, Artificial Sequence
  synthesized
ugacuaugaauacguacagg

SEQ ID NO: 932 - RNA, 20 nt, Artificial Sequence
  synthesized
agcuccguggucugcacuga

SEQ ID NO: 933 - RNA, 20 nt, Artificial Sequence
  synthesized
cuccguggucugcacugauc

SEQ ID NO: 934 - RNA, 20 nt, Artificial Sequence
  synthesized
ggggaagccugguucacugg

SEQ ID NO: 935 - RNA, 20 nt, Artificial Sequence
  synthesized
augccuacgacuggauuagu

SEQ ID NO: 936 - RNA, 20 nt, Artificial Sequence
  synthesized
gccuacgacuggauuaguau

SEQ ID NO: 937 - RNA, 20 nt, Artificial Sequence
  synthesized
aaacaggcaggaaacaggca

SEQ ID NO: 938 - RNA, 20 nt, Artificial Sequence
  synthesized
acaggcaggaaacaggcaga

SEQ ID NO: 939 - RNA, 20 nt, Artificial Sequence
  synthesized
cuacuugaaauuauacagga

SEQ ID NO: 940 - RNA, 20 nt, Artificial Sequence
  synthesized
auuuuuauugagcgccuucu

SEQ ID NO: 941 - RNA, 20 nt, Artificial Sequence
  synthesized
uggaagcuccucuuguguuc

SEQ ID NO: 942 - RNA, 20 nt, Artificial Sequence
  synthesized
ucuugcaggccacuggggca

SEQ ID NO: 943 - RNA, 20 nt, Artificial Sequence
  synthesized
uugcaggccacuggggcacc

SEQ ID NO: 944 - RNA, 20 nt, Artificial Sequence
  synthesized
uuuuaugcuugaaauucucc

SEQ ID NO: 945 - RNA, 20 nt, Artificial Sequence
  synthesized
aacagcauaaguauggaagg

SEQ ID NO: 946 - RNA, 20 nt, Artificial Sequence
  synthesized
uuaacagcauaaguauggaa

SEQ ID NO: 947 - RNA, 20 nt, Artificial Sequence
  synthesized
uuugguauuugaaaugaagg

SEQ ID NO: 948 - RNA, 20 nt, Artificial Sequence
  synthesized
aaaucaaaaaaugaucuggg

SEQ ID NO: 949 - RNA, 20 nt, Artificial Sequence
  synthesized
caugcccagaucauuuuuug

SEQ ID NO: 950 - RNA, 20 nt, Artificial Sequence
  synthesized
cccagaucauuuuuugauuu

SEQ ID NO: 951 - RNA, 20 nt, Artificial Sequence
  synthesized
ugcccagaucauuuuuugau

SEQ ID NO: 952 - RNA, 20 nt, Artificial Sequence
  synthesized
acggcaaaauugagcagaag

SEQ ID NO: 953 - RNA, 20 nt, Artificial Sequence
  synthesized
auuuugccgugaaccuaaaa

SEQ ID NO: 954 - RNA, 20 nt, Artificial Sequence
  synthesized
cuucugcucaauuuugccgu

SEQ ID NO: 955 - RNA, 20 nt, Artificial Sequence
  synthesized
gaguaguuuuagguucacgg

SEQ ID NO: 956 - RNA, 20 nt, Artificial Sequence
  synthesized
guaguuuuagguucacggca

SEQ ID NO: 957 - RNA, 20 nt, Artificial Sequence
  synthesized
ugcucaauuuugccgugaac

SEQ ID NO: 958 - RNA, 20 nt, Artificial Sequence
  synthesized
uuagguucacggcaaaauug

SEQ ID NO: 959 - RNA, 20 nt, Artificial Sequence
  synthesized
uuugccgugaaccuaaaacu

SEQ ID NO: 960 - RNA, 20 nt, Artificial Sequence
  synthesized
aaacuccacaguuuuccucc

SEQ ID NO: 961 - RNA, 20 nt, Artificial Sequence
  synthesized
aaacuccacgguuuuccucc

SEQ ID NO: 962 - RNA, 20 nt, Artificial Sequence
  synthesized
aagugaggaggaaaaccgug

SEQ ID NO: 963 - RNA, 20 nt, Artificial Sequence
  synthesized
aagugaggaggaaaacugug

SEQ ID NO: 964 - RNA, 20 nt, Artificial Sequence
  synthesized
acuccacaguuuuccuccuc

SEQ ID NO: 965 - RNA, 20 nt, Artificial Sequence
  synthesized
acuccacgguuuuccuccuc

SEQ ID NO: 966 - RNA, 20 nt, Artificial Sequence
  synthesized
aggaaaaccguggaguuuaa

SEQ ID NO: 967 - RNA, 20 nt, Artificial Sequence
  synthesized
aggaaaacuguggaguuuaa

SEQ ID NO: 968 - RNA, 20 nt, Artificial Sequence
  synthesized
cacaguuuuccuccucacuu

SEQ ID NO: 969 - RNA, 20 nt, Artificial Sequence
  synthesized
cacgguuuuccuccucacuu

SEQ ID NO: 970 - RNA, 20 nt, Artificial Sequence
  synthesized
cagguuaaacuccacaguuu

SEQ ID NO: 971 - RNA, 20 nt, Artificial Sequence
  synthesized
cagguuaaacuccacgguuu

SEQ ID NO: 972 - RNA, 20 nt, Artificial Sequence
  synthesized
caguuuuccuccucacuuga

SEQ ID NO: 973 - RNA, 20 nt, Artificial Sequence
  synthesized
ccgucagguuaaacuccaca

SEQ ID NO: 974 - RNA, 20 nt, Artificial Sequence
  synthesized
ccgucagguuaaacuccacg

SEQ ID NO: 975 - RNA, 20 nt, Artificial Sequence
  synthesized
cgguuuuccuccucacuuga

SEQ ID NO: 976 - RNA, 20 nt, Artificial Sequence
  synthesized
cguggaguuuaaccugacgg

SEQ ID NO: 977 - RNA, 20 nt, Artificial Sequence
  synthesized
gaggaggaaaaccguggagu

SEQ ID NO: 978 - RNA, 20 nt, Artificial Sequence
  synthesized
gaggaggaaaacuguggagu

SEQ ID NO: 979 - RNA, 20 nt, Artificial Sequence
  synthesized
ggaggaaaaccguggaguuu

SEQ ID NO: 980 - RNA, 20 nt, Artificial Sequence
  synthesized
ggaggaaaacuguggaguuu

SEQ ID NO: 981 - RNA, 20 nt, Artificial Sequence
  synthesized
gguuaaacuccacaguuuuc

SEQ ID NO: 982 - RNA, 20 nt, Artificial Sequence
  synthesized
gguuaaacuccacgguuuuc

SEQ ID NO: 983 - RNA, 20 nt, Artificial Sequence
  synthesized
gucagguuaaacuccacagu

SEQ ID NO: 984 - RNA, 20 nt, Artificial Sequence
  synthesized
gucagguuaaacuccacggu

SEQ ID NO: 985 - RNA, 20 nt, Artificial Sequence
  synthesized
gugaggaggaaaaccgugga

SEQ ID NO: 986 - RNA, 20 nt, Artificial Sequence
  synthesized
gugaggaggaaaacugugga

SEQ ID NO: 987 - RNA, 20 nt, Artificial Sequence
  synthesized
uccacaguuuuccuccucac

SEQ ID NO: 988 - RNA, 20 nt, Artificial Sequence
  synthesized
uccacgguuuuccuccucac

SEQ ID NO: 989 - RNA, 20 nt, Artificial Sequence
  synthesized
uguggaguuuaaccugacgg

SEQ ID NO: 990 - RNA, 20 nt, Artificial Sequence
  synthesized
uuaaacuccacaguuuuccu

SEQ ID NO: 991 - RNA, 20 nt, Artificial Sequence
  synthesized
uuaaacuccacgguuuuccu

SEQ ID NO: 992 - RNA, 20 nt, Artificial Sequence
  synthesized
acacuucagccugagugaca

SEQ ID NO: 993 - RNA, 20 nt, Artificial Sequence
  synthesized
ccugaggagcugggugggac

SEQ ID NO: 994 - RNA, 20 nt, Artificial Sequence
  synthesized
ccugaggagcugggugggau

SEQ ID NO: 995 - RNA, 20 nt, Artificial Sequence
  synthesized
ccuguaaucccacccagcuc

SEQ ID NO: 996 - RNA, 20 nt, Artificial Sequence
  synthesized
ccuguagucccacccagcuc

SEQ ID NO: 997 - RNA, 20 nt, Artificial Sequence
  synthesized
cuuaugccuguaaucccacc

SEQ ID NO: 998 - RNA, 20 nt, Artificial Sequence
  synthesized
cuuaugccuguagucccacc

SEQ ID NO: 999 - RNA, 20 nt, Artificial Sequence
  synthesized
gcugggugggacuacaggca

SEQ ID NO: 1000 - RNA, 20 nt, Artificial Sequence
  synthesized
gcugggugggauuacaggca

SEQ ID NO: 1001 - RNA, 20 nt, Artificial Sequence
  synthesized
ugaggagcugggugggacua

SEQ ID NO: 1002 - RNA, 20 nt, Artificial Sequence
  synthesized
ugaggagcugggugggauua

SEQ ID NO: 1003 - RNA, 20 nt, Artificial Sequence
  synthesized
uguaaucccacccagcuccu

SEQ ID NO: 1004 - RNA, 20 nt, Artificial Sequence
  synthesized
uguagucccacccagcuccu

SEQ ID NO: 1005 - RNA, 20 nt, Artificial Sequence
  synthesized
accagaucccaagccgucac

SEQ ID NO: 1006 - RNA, 20 nt, Artificial Sequence
  synthesized
accaguucccaagccgucac

SEQ ID NO: 1007 - RNA, 20 nt, Artificial Sequence
  synthesized
acuggugagguacuaggguc

SEQ ID NO: 1008 - RNA, 20 nt, Artificial Sequence
  synthesized
aguaccucaccagaucccaa

SEQ ID NO: 1009 - RNA, 20 nt, Artificial Sequence
  synthesized
aguaccucaccaguucccaa

SEQ ID NO: 1010 - RNA, 20 nt, Artificial Sequence
  synthesized
cagaucccaagccgucaccc

SEQ ID NO: 1011 - RNA, 20 nt, Artificial Sequence
  synthesized
caguucccaagccgucaccc

SEQ ID NO: 1012 - RNA, 20 nt, Artificial Sequence
  synthesized
ccucaccagaucccaagccg

SEQ ID NO: 1013 - RNA, 20 nt, Artificial Sequence
  synthesized
ccucaccaguucccaagccg

SEQ ID NO: 1014 - RNA, 20 nt, Artificial Sequence
  synthesized
cggcuugggaacuggugagg

SEQ ID NO: 1015 - RNA, 20 nt, Artificial Sequence
  synthesized
cggcuugggaucuggugagg

SEQ ID NO: 1016 - RNA, 20 nt, Artificial Sequence
  synthesized
cuaguaccucaccagauccc

SEQ ID NO: 1017 - RNA, 20 nt, Artificial Sequence
  synthesized
cuaguaccucaccaguuccc

SEQ ID NO: 1018 - RNA, 20 nt, Artificial Sequence
  synthesized
gaacuggugagguacuaggg

SEQ ID NO: 1019 - RNA, 20 nt, Artificial Sequence
  synthesized
gacccuaguaccucaccaga

SEQ ID NO: 1020 - RNA, 20 nt, Artificial Sequence
  synthesized
gacccuaguaccucaccagu

SEQ ID NO: 1021 - RNA, 20 nt, Artificial Sequence
  synthesized
gacggcuugggaacugguga

SEQ ID NO: 1022 - RNA, 20 nt, Artificial Sequence
  synthesized
gacggcuugggaucugguga

SEQ ID NO: 1023 - RNA, 20 nt, Artificial Sequence
  synthesized
gaucccaagccgucacccuu

SEQ ID NO: 1024 - RNA, 20 nt, Artificial Sequence
  synthesized
gaucuggugagguacuaggg

SEQ ID NO: 1025 - RNA, 20 nt, Artificial Sequence
  synthesized
gcuugggaacuggugaggua

SEQ ID NO: 1026 - RNA, 20 nt, Artificial Sequence
  synthesized
gcuugggaucuggugaggua

SEQ ID NO: 1027 - RNA, 20 nt, Artificial Sequence
  synthesized
gggaacuggugagguacuag

SEQ ID NO: 1028 - RNA, 20 nt, Artificial Sequence
  synthesized
gggaucuggugagguacuag

SEQ ID NO: 1029 - RNA, 20 nt, Artificial Sequence
  synthesized
gggugacggcuugggaacug

SEQ ID NO: 1030 - RNA, 20 nt, Artificial Sequence
  synthesized
gggugacggcuugggaucug

SEQ ID NO: 1031 - RNA, 20 nt, Artificial Sequence
  synthesized
gugacggcuugggaacuggu

SEQ ID NO: 1032 - RNA, 20 nt, Artificial Sequence
  synthesized
gugacggcuugggaucuggu

SEQ ID NO: 1033 - RNA, 20 nt, Artificial Sequence
  synthesized
guucccaagccgucacccuu

SEQ ID NO: 1034 - RNA, 20 nt, Artificial Sequence
  synthesized
ucaccagaucccaagccguc

SEQ ID NO: 1035 - RNA, 20 nt, Artificial Sequence
  synthesized
ucaccaguucccaagccguc

SEQ ID NO: 1036 - RNA, 20 nt, Artificial Sequence
  synthesized
ucuggugagguacuaggguc

SEQ ID NO: 1037 - RNA, 20 nt, Artificial Sequence
  synthesized
acacuuacgugacuuagggg

SEQ ID NO: 1038 - RNA, 20 nt, Artificial Sequence
  synthesized
acacuuaugugacuuagggg

SEQ ID NO: 1039 - RNA, 20 nt, Artificial Sequence
  synthesized
acagagccccuaagucacau

SEQ ID NO: 1040 - RNA, 20 nt, Artificial Sequence
  synthesized
acagagccccuaagucacgu

SEQ ID NO: 1041 - RNA, 20 nt, Artificial Sequence
  synthesized
acauaagugugcaagucaga

SEQ ID NO: 1042 - RNA, 20 nt, Artificial Sequence
  synthesized
acguaagugugcaagucaga

SEQ ID NO: 1043 - RNA, 20 nt, Artificial Sequence
  synthesized
acgugacuuaggggcucugu

SEQ ID NO: 1044 - RNA, 20 nt, Artificial Sequence
  synthesized
acuuacgugacuuaggggcu

SEQ ID NO: 1045 - RNA, 20 nt, Artificial Sequence
  synthesized
acuuaugugacuuaggggcu

SEQ ID NO: 1046 - RNA, 20 nt, Artificial Sequence
  synthesized
acuugcacacuuacgugacu

SEQ ID NO: 1047 - RNA, 20 nt, Artificial Sequence
  synthesized
acuugcacacuuaugugacu

SEQ ID NO: 1048 - RNA, 20 nt, Artificial Sequence
  synthesized
agagccccuaagucacauaa

SEQ ID NO: 1049 - RNA, 20 nt, Artificial Sequence
  synthesized
agagccccuaagucacguaa

SEQ ID NO: 1050 - RNA, 20 nt, Artificial Sequence
  synthesized
agccccuaagucacauaagu

SEQ ID NO: 1051 - RNA, 20 nt, Artificial Sequence
  synthesized
agccccuaagucacguaagu

SEQ ID NO: 1052 - RNA, 20 nt, Artificial Sequence
  synthesized
auaagugugcaagucagaac

SEQ ID NO: 1053 - RNA, 20 nt, Artificial Sequence
  synthesized
augugacuuaggggcucugu

SEQ ID NO: 1054 - RNA, 20 nt, Artificial Sequence
  synthesized
ccuaagucacauaagugugc

SEQ ID NO: 1055 - RNA, 20 nt, Artificial Sequence
  synthesized
ccuaagucacguaagugugc

SEQ ID NO: 1056 - RNA, 20 nt, Artificial Sequence
  synthesized
gcacacuuacgugacuuagg

SEQ ID NO: 1057 - RNA, 20 nt, Artificial Sequence
  synthesized
gcacacuuaugugacuuagg

SEQ ID NO: 1058 - RNA, 20 nt, Artificial Sequence
  synthesized
guaagugugcaagucagaac

SEQ ID NO: 1059 - RNA, 20 nt, Artificial Sequence
  synthesized
guucugacuugcacacuuac

SEQ ID NO: 1060 - RNA, 20 nt, Artificial Sequence
  synthesized
guucugacuugcacacuuau

SEQ ID NO: 1061 - RNA, 20 nt, Artificial Sequence
  synthesized
uaagucacauaagugugcaa

SEQ ID NO: 1062 - RNA, 20 nt, Artificial Sequence
  synthesized
uaagucacguaagugugcaa

SEQ ID NO: 1063 - RNA, 20 nt, Artificial Sequence
  synthesized
ucacauaagugugcaaguca

SEQ ID NO: 1064 - RNA, 20 nt, Artificial Sequence
  synthesized
ucacguaagugugcaaguca

SEQ ID NO: 1065 - RNA, 20 nt, Artificial Sequence
  synthesized
ucugacuugcacacuuacgu

SEQ ID NO: 1066 - RNA, 20 nt, Artificial Sequence
  synthesized
ucugacuugcacacuuaugu

SEQ ID NO: 1067 - RNA, 20 nt, Artificial Sequence
  synthesized
ugacuugcacacuuacguga

SEQ ID NO: 1068 - RNA, 20 nt, Artificial Sequence
  synthesized
ugacuugcacacuuauguga

SEQ ID NO: 1069 - RNA, 20 nt, Artificial Sequence
  synthesized
aaaccuacccggcgucacca

SEQ ID NO: 1070 - RNA, 20 nt, Artificial Sequence
  synthesized
aaaccuacccggggucacca

SEQ ID NO: 1071 - RNA, 20 nt, Artificial Sequence
  synthesized
accuacccggcgucaccaca

SEQ ID NO: 1072 - RNA, 20 nt, Artificial Sequence
  synthesized
accuacccggggucaccaca

SEQ ID NO: 1073 - RNA, 20 nt, Artificial Sequence
  synthesized
ccccggguagguuucagcuc

SEQ ID NO: 1074 - RNA, 20 nt, Artificial Sequence
  synthesized
ccuguguguggugaccccgg

SEQ ID NO: 1075 - RNA, 20 nt, Artificial Sequence
  synthesized
ccuguguguggugacgccgg

SEQ ID NO: 1076 - RNA, 20 nt, Artificial Sequence
  synthesized
cgccggguagguuucagcuc

SEQ ID NO: 1077 - RNA, 20 nt, Artificial Sequence
  synthesized
cgucaccacacacagguggc

SEQ ID NO: 1078 - RNA, 20 nt, Artificial Sequence
  synthesized
cuacccggcgucaccacaca

SEQ ID NO: 1079 - RNA, 20 nt, Artificial Sequence
  synthesized
cuacccggggucaccacaca

SEQ ID NO: 1080 - RNA, 20 nt, Artificial Sequence
  synthesized
gaccccggguagguuucagc

SEQ ID NO: 1081 - RNA, 20 nt, Artificial Sequence
  synthesized
gacgccggguagguuucagc

SEQ ID NO: 1082 - RNA, 20 nt, Artificial Sequence
  synthesized
gagcugaaaccuacccggcg

SEQ ID NO: 1083 - RNA, 20 nt, Artificial Sequence
  synthesized
gagcugaaaccuacccgggg

SEQ ID NO: 1084 - RNA, 20 nt, Artificial Sequence
  synthesized
gcugaaaccuacccggcguc

SEQ ID NO: 1085 - RNA, 20 nt, Artificial Sequence
  synthesized
gcugaaaccuacccgggguc

SEQ ID NO: 1086 - RNA, 20 nt, Artificial Sequence
  synthesized
ggcgucaccacacacaggug

SEQ ID NO: 1087 - RNA, 20 nt, Artificial Sequence
  synthesized
ggggucaccacacacaggug

SEQ ID NO: 1088 - RNA, 20 nt, Artificial Sequence
  synthesized
ggucaccacacacagguggc

SEQ ID NO: 1089 - RNA, 20 nt, Artificial Sequence
  synthesized
gugaccccggguagguuuca

SEQ ID NO: 1090 - RNA, 20 nt, Artificial Sequence
  synthesized
gugacgccggguagguuuca

SEQ ID NO: 1091 - RNA, 20 nt, Artificial Sequence
  synthesized
ugaaaccuacccggcgucac

SEQ ID NO: 1092 - RNA, 20 nt, Artificial Sequence
  synthesized
ugaaaccuacccggggucac

SEQ ID NO: 1093 - RNA, 20 nt, Artificial Sequence
  synthesized
uggugaccccggguagguuu

SEQ ID NO: 1094 - RNA, 20 nt, Artificial Sequence
  synthesized
uggugacgccggguagguuu

SEQ ID NO: 1095 - RNA, 20 nt, Artificial Sequence
  synthesized
uguggugaccccggguaggu

SEQ ID NO: 1096 - RNA, 20 nt, Artificial Sequence
  synthesized
uguggugacgccggguaggu

SEQ ID NO: 1097 - RNA, 20 nt, Artificial Sequence
  synthesized
uguguggugaccccggguag

SEQ ID NO: 1098 - RNA, 20 nt, Artificial Sequence
  synthesized
uguguggugacgccggguag

SEQ ID NO: 1099 - RNA, 20 nt, Artificial Sequence
  synthesized
aaaggaguccuugucuuagu

SEQ ID NO: 1100 - RNA, 20 nt, Artificial Sequence
  synthesized
aaaggaguccuugucuuggu

SEQ ID NO: 1101 - RNA, 20 nt, Artificial Sequence
  synthesized
aagaagggaccaagacaagg

SEQ ID NO: 1102 - RNA, 20 nt, Artificial Sequence
  synthesized
aagaagggacuaagacaagg

SEQ ID NO: 1103 - RNA, 20 nt, Artificial Sequence
  synthesized
acaaaggaguccuugucuua

SEQ ID NO: 1104 - RNA, 20 nt, Artificial Sequence
  synthesized
acaaaggaguccuugucuug

SEQ ID NO: 1105 - RNA, 20 nt, Artificial Sequence
  synthesized
accaagacaaggacuccuuu

SEQ ID NO: 1106 - RNA, 20 nt, Artificial Sequence
  synthesized
acuaagacaaggacuccuuu

SEQ ID NO: 1107 - RNA, 20 nt, Artificial Sequence
  synthesized
aggaguccuugucuuagucc

SEQ ID NO: 1108 - RNA, 20 nt, Artificial Sequence
  synthesized
aggaguccuugucuuggucc

SEQ ID NO: 1109 - RNA, 20 nt, Artificial Sequence
  synthesized
agggaccaagacaaggacuc

SEQ ID NO: 1110 - RNA, 20 nt, Artificial Sequence
  synthesized
agggacuaagacaaggacuc

SEQ ID NO: 1111 - RNA, 20 nt, Artificial Sequence
  synthesized
ccuugucuuagucccuucuu

SEQ ID NO: 1112 - RNA, 20 nt, Artificial Sequence
  synthesized
ccuugucuuggucccuucuu

SEQ ID NO: 1113 - RNA, 20 nt, Artificial Sequence
  synthesized
cuuagucccuucuuguaauc

SEQ ID NO: 1114 - RNA, 20 nt, Artificial Sequence
  synthesized
cuuggucccuucuuguaauc

SEQ ID NO: 1115 - RNA, 20 nt, Artificial Sequence
  synthesized
gaagggaccaagacaaggac

SEQ ID NO: 1116 - RNA, 20 nt, Artificial Sequence
  synthesized
gaagggacuaagacaaggac

SEQ ID NO: 1117 - RNA, 20 nt, Artificial Sequence
  synthesized
gaguccuugucuuagucccu

SEQ ID NO: 1118 - RNA, 20 nt, Artificial Sequence
  synthesized
gaguccuugucuuggucccu

SEQ ID NO: 1119 - RNA, 20 nt, Artificial Sequence
  synthesized
gauuacaagaagggaccaag

SEQ ID NO: 1120 - RNA, 20 nt, Artificial Sequence
  synthesized
gauuacaagaagggacuaag

SEQ ID NO: 1121 - RNA, 20 nt, Artificial Sequence
  synthesized
ggaccaagacaaggacuccu

SEQ ID NO: 1122 - RNA, 20 nt, Artificial Sequence
  synthesized
ggacuaagacaaggacuccu

SEQ ID NO: 1123 - RNA, 20 nt, Artificial Sequence
  synthesized
guccuugucuuagucccuuc

SEQ ID NO: 1124 - RNA, 20 nt, Artificial Sequence
  synthesized
guccuugucuuggucccuuc

SEQ ID NO: 1125 - RNA, 20 nt, Artificial Sequence
  synthesized
gucuuagucccuucuuguaa

SEQ ID NO: 1126 - RNA, 20 nt, Artificial Sequence
  synthesized
gucuuggucccuucuuguaa

SEQ ID NO: 1127 - RNA, 20 nt, Artificial Sequence
  synthesized
uagucccuucuuguaaucug

SEQ ID NO: 1128 - RNA, 20 nt, Artificial Sequence
  synthesized
uggucccuucuuguaaucug

SEQ ID NO: 1129 - RNA, 20 nt, Artificial Sequence
  synthesized
uuacaagaagggaccaagac

SEQ ID NO: 1130 - RNA, 20 nt, Artificial Sequence
  synthesized
uuacaagaagggacuaagac

SEQ ID NO: 1131 - RNA, 20 nt, Artificial Sequence
  synthesized
uugucuuagucccuucuugu

SEQ ID NO: 1132 - RNA, 20 nt, Artificial Sequence
  synthesized
uugucuuggucccuucuugu

SEQ ID NO: 1133 - RNA, 20 nt, Artificial Sequence
  synthesized
acaaaugcccugagguggga

SEQ ID NO: 1134 - RNA, 20 nt, Artificial Sequence
  synthesized
accugugugucuguacaaau

SEQ ID NO: 1135 - RNA, 20 nt, Artificial Sequence
  synthesized
accugugugucugugcaaau

SEQ ID NO: 1136 - RNA, 20 nt, Artificial Sequence
  synthesized
cagggcauuugcacagacac

SEQ ID NO: 1137 - RNA, 20 nt, Artificial Sequence
  synthesized
cagggcauuuguacagacac

SEQ ID NO: 1138 - RNA, 20 nt, Artificial Sequence
  synthesized
cucagggcauuugcacagac

SEQ ID NO: 1139 - RNA, 20 nt, Artificial Sequence
  synthesized
cucagggcauuuguacagac

SEQ ID NO: 1140 - RNA, 20 nt, Artificial Sequence
  synthesized
cugugugucuguacaaaugc

SEQ ID NO: 1141 - RNA, 20 nt, Artificial Sequence
  synthesized
cugugugucugugcaaaugc

SEQ ID NO: 1142 - RNA, 20 nt, Artificial Sequence
  synthesized
gcaccugugugucuguacaa

SEQ ID NO: 1143 - RNA, 20 nt, Artificial Sequence
  synthesized
gcaccugugugucugugcaa

SEQ ID NO: 1144 - RNA, 20 nt, Artificial Sequence
  synthesized
gcauuugcacagacacacag

SEQ ID NO: 1145 - RNA, 20 nt, Artificial Sequence
  synthesized
gcauuuguacagacacacag

SEQ ID NO: 1146 - RNA, 20 nt, Artificial Sequence
  synthesized
gggcaccugugugucuguac

SEQ ID NO: 1147 - RNA, 20 nt, Artificial Sequence
  synthesized
gggcaccugugugucugugc

SEQ ID NO: 1148 - RNA, 20 nt, Artificial Sequence
  synthesized
guacaaaugcccugaggugg

SEQ ID NO: 1149 - RNA, 20 nt, Artificial Sequence
  synthesized
gucuguacaaaugcccugag

SEQ ID NO: 1150 - RNA, 20 nt, Artificial Sequence
  synthesized
gucugugcaaaugcccugag

SEQ ID NO: 1151 - RNA, 20 nt, Artificial Sequence
  synthesized
aagaacucgccauauagcag

SEQ ID NO: 1152 - RNA, 20 nt, Artificial Sequence
  synthesized
aagauuaagaacucgccaua

SEQ ID NO: 1153 - RNA, 20 nt, Artificial Sequence
  synthesized
aagauuaggaacucgccaua

SEQ ID NO: 1154 - RNA, 20 nt, Artificial Sequence
  synthesized
agagcaggaagauuaagaac

SEQ ID NO: 1155 - RNA, 20 nt, Artificial Sequence
  synthesized
agagcaggaagauuaggaac

SEQ ID NO: 1156 - RNA, 20 nt, Artificial Sequence
  synthesized
agcaggaagauuaagaacuc

SEQ ID NO: 1157 - RNA, 20 nt, Artificial Sequence
  synthesized
agcaggaagauuaggaacuc

SEQ ID NO: 1158 - RNA, 20 nt, Artificial Sequence
  synthesized
aggaacucgccauauagcag

SEQ ID NO: 1159 - RNA, 20 nt, Artificial Sequence
  synthesized
caggaagauuaagaacucgc

SEQ ID NO: 1160 - RNA, 20 nt, Artificial Sequence
  synthesized
caggaagauuaggaacucgc

SEQ ID NO: 1161 - RNA, 20 nt, Artificial Sequence
  synthesized
cugcuauauggcgaguuccu

SEQ ID NO: 1162 - RNA, 20 nt, Artificial Sequence
  synthesized
cugcuauauggcgaguucuu

SEQ ID NO: 1163 - RNA, 20 nt, Artificial Sequence
  synthesized
gaguuccuaaucuuccugcu

SEQ ID NO: 1164 - RNA, 20 nt, Artificial Sequence
  synthesized
gaguucuuaaucuuccugcu

SEQ ID NO: 1165 - RNA, 20 nt, Artificial Sequence
  synthesized
gauuaagaacucgccauaua

SEQ ID NO: 1166 - RNA, 20 nt, Artificial Sequence
  synthesized
gauuaggaacucgccauaua

SEQ ID NO: 1167 - RNA, 20 nt, Artificial Sequence
  synthesized
gcgaguuccuaaucuuccug

SEQ ID NO: 1168 - RNA, 20 nt, Artificial Sequence
  synthesized
gcgaguucuuaaucuuccug

SEQ ID NO: 1169 - RNA, 20 nt, Artificial Sequence
  synthesized
gcuauauggcgaguuccuaa

SEQ ID NO: 1170 - RNA, 20 nt, Artificial Sequence
  synthesized
gcuauauggcgaguucuuaa

SEQ ID NO: 1171 - RNA, 20 nt, Artificial Sequence
  synthesized
guuccuaaucuuccugcucu

SEQ ID NO: 1172 - RNA, 20 nt, Artificial Sequence
  synthesized
guucuuaaucuuccugcucu

SEQ ID NO: 1173 - RNA, 20 nt, Artificial Sequence
  synthesized
uagcagagcaggaagauuaa

SEQ ID NO: 1174 - RNA, 20 nt, Artificial Sequence
  synthesized
uagcagagcaggaagauuag

SEQ ID NO: 1175 - RNA, 20 nt, Artificial Sequence
  synthesized
uauauggcgaguuccuaauc

SEQ ID NO: 1176 - RNA, 20 nt, Artificial Sequence
  synthesized
uauauggcgaguucuuaauc

SEQ ID NO: 1177 - RNA, 20 nt, Artificial Sequence
  synthesized
uauggcgaguuccuaaucuu

SEQ ID NO: 1178 - RNA, 20 nt, Artificial Sequence
  synthesized
uauggcgaguucuuaaucuu

SEQ ID NO: 1179 - RNA, 20 nt, Artificial Sequence
  synthesized
uccuaaucuuccugcucugc

SEQ ID NO: 1180 - RNA, 20 nt, Artificial Sequence
  synthesized
ucuuaaucuuccugcucugc

SEQ ID NO: 1181 - RNA, 20 nt, Artificial Sequence
  synthesized
uggcgaguuccuaaucuucc

SEQ ID NO: 1182 - RNA, 20 nt, Artificial Sequence
  synthesized
uggcgaguucuuaaucuucc

SEQ ID NO: 1183 - RNA, 20 nt, Artificial Sequence
  synthesized
uuaagaacucgccauauagc

SEQ ID NO: 1184 - RNA, 20 nt, Artificial Sequence
  synthesized
uuaggaacucgccauauagc

SEQ ID NO: 1185 - RNA, 20 nt, Artificial Sequence
  synthesized
aaggcagugggugggagaac

SEQ ID NO: 1186 - RNA, 20 nt, Artificial Sequence
  synthesized
aaggcggugggugggagaac

SEQ ID NO: 1187 - RNA, 20 nt, Artificial Sequence
  synthesized
acccaccgccuucuucacuc

SEQ ID NO: 1188 - RNA, 20 nt, Artificial Sequence
  synthesized
acccacugccuucuucacuc

SEQ ID NO: 1189 - RNA, 20 nt, Artificial Sequence
  synthesized
accgccuucuucacuccacu

SEQ ID NO: 1190 - RNA, 20 nt, Artificial Sequence
  synthesized
acugccuucuucacuccacu

SEQ ID NO: 1191 - RNA, 20 nt, Artificial Sequence
  synthesized
agaaggcagugggugggaga

SEQ ID NO: 1192 - RNA, 20 nt, Artificial Sequence
  synthesized
agaaggcggugggugggaga

SEQ ID NO: 1193 - RNA, 20 nt, Artificial Sequence
  synthesized
agaguggagugaagaaggca

SEQ ID NO: 1194 - RNA, 20 nt, Artificial Sequence
  synthesized
agaguggagugaagaaggcg

SEQ ID NO: 1195 - RNA, 20 nt, Artificial Sequence
  synthesized
agguucucccacccaccgcc

SEQ ID NO: 1196 - RNA, 20 nt, Artificial Sequence
  synthesized
agguucucccacccacugcc

SEQ ID NO: 1197 - RNA, 20 nt, Artificial Sequence
  synthesized
ccacccaccgccuucuucac

SEQ ID NO: 1198 - RNA, 20 nt, Artificial Sequence
  synthesized
ccacccacugccuucuucac

SEQ ID NO: 1199 - RNA, 20 nt, Artificial Sequence
  synthesized
ccaccgccuucuucacucca

SEQ ID NO: 1200 - RNA, 20 nt, Artificial Sequence
  synthesized
ccacugccuucuucacucca

SEQ ID NO: 1201 - RNA, 20 nt, Artificial Sequence
  synthesized
cgccuucuucacuccacucu

SEQ ID NO: 1202 - RNA, 20 nt, Artificial Sequence
  synthesized
gaagaaggcaguggguggga

SEQ ID NO: 1203 - RNA, 20 nt, Artificial Sequence
  synthesized
gaagaaggcgguggguggga

SEQ ID NO: 1204 - RNA, 20 nt, Artificial Sequence
  synthesized
gcagguucucccacccaccg

SEQ ID NO: 1205 - RNA, 20 nt, Artificial Sequence
  synthesized
gcagguucucccacccacug

SEQ ID NO: 1206 - RNA, 20 nt, Artificial Sequence
  synthesized
ggcagugggugggagaaccu

SEQ ID NO: 1207 - RNA, 20 nt, Artificial Sequence
  synthesized
ggcggugggugggagaaccu

SEQ ID NO: 1208 - RNA, 20 nt, Artificial Sequence
  synthesized
guucucccacccaccgccuu

SEQ ID NO: 1209 - RNA, 20 nt, Artificial Sequence
  synthesized
guucucccacccacugccuu

SEQ ID NO: 1210 - RNA, 20 nt, Artificial Sequence
  synthesized
ucccacccaccgccuucuuc

SEQ ID NO: 1211 - RNA, 20 nt, Artificial Sequence
  synthesized
ucccacccacugccuucuuc

SEQ ID NO: 1212 - RNA, 20 nt, Artificial Sequence
  synthesized
ucucccacccaccgccuucu

SEQ ID NO: 1213 - RNA, 20 nt, Artificial Sequence
  synthesized
ucucccacccacugccuucu

SEQ ID NO: 1214 - RNA, 20 nt, Artificial Sequence
  synthesized
ugccuucuucacuccacucu

SEQ ID NO: 1215 - RNA, 20 nt, Artificial Sequence
  synthesized
uggagugaagaaggcagugg

SEQ ID NO: 1216 - RNA, 20 nt, Artificial Sequence
  synthesized
uggagugaagaaggcggugg

SEQ ID NO: 1217 - RNA, 20 nt, Artificial Sequence
  synthesized
aaaaacacuauuucgcaaug

SEQ ID NO: 1218 - RNA, 20 nt, Artificial Sequence
  synthesized
aaaaacuauuucgcaaugac

SEQ ID NO: 1219 - RNA, 20 nt, Artificial Sequence
  synthesized
aaacacuauuucgcaaugac

SEQ ID NO: 1220 - RNA, 20 nt, Artificial Sequence
  synthesized
aggucauugcgaaauagugu

SEQ ID NO: 1221 - RNA, 20 nt, Artificial Sequence
  synthesized
aggucauugcgaaauaguuu

SEQ ID NO: 1222 - RNA, 20 nt, Artificial Sequence
  synthesized
aucugccuagaaaaaaaaac

SEQ ID NO: 1223 - RNA, 20 nt, Artificial Sequence
  synthesized
cauugcgaaauaguguuuuu

SEQ ID NO: 1224 - RNA, 20 nt, Artificial Sequence
  synthesized
cugccuagaaaaaaaaaaac

SEQ ID NO: 1225 - RNA, 20 nt, Artificial Sequence
  synthesized
cugccuagaaaaaaaaacac

SEQ ID NO: 1226 - RNA, 20 nt, Artificial Sequence
  synthesized
gucauugcgaaauaguguuu

SEQ ID NO: 1227 - RNA, 20 nt, Artificial Sequence
  synthesized
gucauugcgaaauaguuuuu

SEQ ID NO: 1228 - RNA, 20 nt, Artificial Sequence
  synthesized
guguuuuuuuuucuaggcag

SEQ ID NO: 1229 - RNA, 20 nt, Artificial Sequence
  synthesized
guuuuuuuuucuaggcagau

SEQ ID NO: 1230 - RNA, 20 nt, Artificial Sequence
  synthesized
guuuuuuuuuuucuaggcag

SEQ ID NO: 1231 - RNA, 20 nt, Artificial Sequence
  synthesized
aagaucaggaucucccuaug

SEQ ID NO: 1232 - RNA, 20 nt, Artificial Sequence
  synthesized
acaagaucaggaucucccua

SEQ ID NO: 1233 - RNA, 20 nt, Artificial Sequence
  synthesized
acaggaucaggaucucccua

SEQ ID NO: 1234 - RNA, 20 nt, Artificial Sequence
  synthesized
agacaagaucaggaucuccc

SEQ ID NO: 1235 - RNA, 20 nt, Artificial Sequence
  synthesized
agacaggaucaggaucuccc

SEQ ID NO: 1236 - RNA, 20 nt, Artificial Sequence
  synthesized
agagacaagaucaggaucuc

SEQ ID NO: 1237 - RNA, 20 nt, Artificial Sequence
  synthesized
agagacaggaucaggaucuc

SEQ ID NO: 1238 - RNA, 20 nt, Artificial Sequence
  synthesized
auagagacaagaucaggauc

SEQ ID NO: 1239 - RNA, 20 nt, Artificial Sequence
  synthesized
auagagacaggaucaggauc

SEQ ID NO: 1240 - RNA, 20 nt, Artificial Sequence
  synthesized
cauagggagauccugauccu

SEQ ID NO: 1241 - RNA, 20 nt, Artificial Sequence
  synthesized
cauagggagauccugaucuu

SEQ ID NO: 1242 - RNA, 20 nt, Artificial Sequence
  synthesized
cugauccugucucuauaaaa

SEQ ID NO: 1243 - RNA, 20 nt, Artificial Sequence
  synthesized
cugaucuugucucuauaaaa

SEQ ID NO: 1244 - RNA, 20 nt, Artificial Sequence
  synthesized
gagauccugauccugucucu

SEQ ID NO: 1245 - RNA, 20 nt, Artificial Sequence
  synthesized
gagauccugaucuugucucu

SEQ ID NO: 1246 - RNA, 20 nt, Artificial Sequence
  synthesized
gauccugauccugucucuau

SEQ ID NO: 1247 - RNA, 20 nt, Artificial Sequence
  synthesized
gauccugaucuugucucuau

SEQ ID NO: 1248 - RNA, 20 nt, Artificial Sequence
  synthesized
gggagauccugauccugucu

SEQ ID NO: 1249 - RNA, 20 nt, Artificial Sequence
  synthesized
gggagauccugaucuugucu

SEQ ID NO: 1250 - RNA, 20 nt, Artificial Sequence
  synthesized
uagggagauccugauccugu

SEQ ID NO: 1251 - RNA, 20 nt, Artificial Sequence
  synthesized
uagggagauccugaucuugu

SEQ ID NO: 1252 - RNA, 20 nt, Artificial Sequence
  synthesized
uccugauccugucucuauaa

SEQ ID NO: 1253 - RNA, 20 nt, Artificial Sequence
  synthesized
uccugaucuugucucuauaa

SEQ ID NO: 1254 - RNA, 20 nt, Artificial Sequence
  synthesized
uuauagagacaagaucagga

SEQ ID NO: 1255 - RNA, 20 nt, Artificial Sequence
  synthesized
uuauagagacaggaucagga

SEQ ID NO: 1256 - RNA, 20 nt, Artificial Sequence
  synthesized
uuuuauagagacaagaucag

SEQ ID NO: 1257 - RNA, 20 nt, Artificial Sequence
  synthesized
uuuuauagagacaggaucag

SEQ ID NO: 1258 - RNA, 20 nt, Artificial Sequence
  synthesized
accucaggcucucggaagac

SEQ ID NO: 1259 - RNA, 20 nt, Artificial Sequence
  synthesized
accuccggcucucggaagac

SEQ ID NO: 1260 - RNA, 20 nt, Artificial Sequence
  synthesized
agccggaggugggguugcag

SEQ ID NO: 1261 - RNA, 20 nt, Artificial Sequence
  synthesized
agccugaggugggguugcag

SEQ ID NO: 1262 - RNA, 20 nt, Artificial Sequence
  synthesized
ccaccucaggcucucggaag

SEQ ID NO: 1263 - RNA, 20 nt, Artificial Sequence
  synthesized
ccaccuccggcucucggaag

SEQ ID NO: 1264 - RNA, 20 nt, Artificial Sequence
  synthesized
ccggaggugggguugcagaa

SEQ ID NO: 1265 - RNA, 20 nt, Artificial Sequence
  synthesized
ccugaggugggguugcagaa

SEQ ID NO: 1266 - RNA, 20 nt, Artificial Sequence
  synthesized
cgagagccggaggugggguu

SEQ ID NO: 1267 - RNA, 20 nt, Artificial Sequence
  synthesized
cgagagccugaggugggguu

SEQ ID NO: 1268 - RNA, 20 nt, Artificial Sequence
  synthesized
cucaggcucucggaagaccc

SEQ ID NO: 1269 - RNA, 20 nt, Artificial Sequence
  synthesized
cuccggcucucggaagaccc

SEQ ID NO: 1270 - RNA, 20 nt, Artificial Sequence
  synthesized
cugcaaccccaccucaggcu

SEQ ID NO: 1271 - RNA, 20 nt, Artificial Sequence
  synthesized
cugcaaccccaccuccggcu

SEQ ID NO: 1272 - RNA, 20 nt, Artificial Sequence
  synthesized
cuuccgagagccggaggugg

SEQ ID NO: 1273 - RNA, 20 nt, Artificial Sequence
  synthesized
cuuccgagagccugaggugg

SEQ ID NO: 1274 - RNA, 20 nt, Artificial Sequence
  synthesized
gauucugcaaccccaccuca

SEQ ID NO: 1275 - RNA, 20 nt, Artificial Sequence
  synthesized
gauucugcaaccccaccucc

SEQ ID NO: 1276 - RNA, 20 nt, Artificial Sequence
  synthesized
ggaggugggguugcagaauc

SEQ ID NO: 1277 - RNA, 20 nt, Artificial Sequence
  synthesized
gggucuuccgagagccggag

SEQ ID NO: 1278 - RNA, 20 nt, Artificial Sequence
  synthesized
gggucuuccgagagccugag

SEQ ID NO: 1279 - RNA, 20 nt, Artificial Sequence
  synthesized
uccgagagccggaggugggg

SEQ ID NO: 1280 - RNA, 20 nt, Artificial Sequence
  synthesized
uccgagagccugaggugggg

SEQ ID NO: 1281 - RNA, 20 nt, Artificial Sequence
  synthesized
ugaggugggguugcagaauc

SEQ ID NO: 1282 - RNA, 20 nt, Artificial Sequence
  synthesized
uucugcaaccccaccucagg

SEQ ID NO: 1283 - RNA, 20 nt, Artificial Sequence
  synthesized
uucugcaaccccaccuccgg

SEQ ID NO: 1284 - RNA, 20 nt, Artificial Sequence
  synthesized
acaccccucagccccacucc

SEQ ID NO: 1285 - RNA, 20 nt, Artificial Sequence
  synthesized
acagacaccccucagcccca

SEQ ID NO: 1286 - RNA, 20 nt, Artificial Sequence
  synthesized
acagacgccccucagcccca

SEQ ID NO: 1287 - RNA, 20 nt, Artificial Sequence
  synthesized
accccucagccccacuccca

SEQ ID NO: 1288 - RNA, 20 nt, Artificial Sequence
  synthesized
acgccccucagccccacucc

SEQ ID NO: 1289 - RNA, 20 nt, Artificial Sequence
  synthesized
agacaccccucagccccacu

SEQ ID NO: 1290 - RNA, 20 nt, Artificial Sequence
  synthesized
agacgccccucagccccacu

SEQ ID NO: 1291 - RNA, 20 nt, Artificial Sequence
  synthesized
aggggcgucuguggggcacu

SEQ ID NO: 1292 - RNA, 20 nt, Artificial Sequence
  synthesized
aggggugucuguggggcacu

SEQ ID NO: 1293 - RNA, 20 nt, Artificial Sequence
  synthesized
agugccccacagacaccccu

SEQ ID NO: 1294 - RNA, 20 nt, Artificial Sequence
  synthesized
agugccccacagacgccccu

SEQ ID NO: 1295 - RNA, 20 nt, Artificial Sequence
  synthesized
aguggggcugaggggcgucu

SEQ ID NO: 1296 - RNA, 20 nt, Artificial Sequence
  synthesized
aguggggcugaggggugucu

SEQ ID NO: 1297 - RNA, 20 nt, Artificial Sequence
  synthesized
ccacagacaccccucagccc

SEQ ID NO: 1298 - RNA, 20 nt, Artificial Sequence
  synthesized
ccacagacgccccucagccc

SEQ ID NO: 1299 - RNA, 20 nt, Artificial Sequence
  synthesized
ccccacagacaccccucagc

SEQ ID NO: 1300 - RNA, 20 nt, Artificial Sequence
  synthesized
ccccacagacgccccucagc

SEQ ID NO: 1301 - RNA, 20 nt, Artificial Sequence
  synthesized
cuacagugccccacagacac

SEQ ID NO: 1302 - RNA, 20 nt, Artificial Sequence
  synthesized
cuacagugccccacagacgc

SEQ ID NO: 1303 - RNA, 20 nt, Artificial Sequence
  synthesized
gccccucagccccacuccca

SEQ ID NO: 1304 - RNA, 20 nt, Artificial Sequence
  synthesized
gcgucuguggggcacuguag

SEQ ID NO: 1305 - RNA, 20 nt, Artificial Sequence
  synthesized
gcugaggggcgucugugggg

SEQ ID NO: 1306 - RNA, 20 nt, Artificial Sequence
  synthesized
gcugaggggugucugugggg

SEQ ID NO: 1307 - RNA, 20 nt, Artificial Sequence
  synthesized
ggaguggggcugaggggcgu

SEQ ID NO: 1308 - RNA, 20 nt, Artificial Sequence
  synthesized
ggaguggggcugaggggugu

SEQ ID NO: 1309 - RNA, 20 nt, Artificial Sequence
  synthesized
gggcugaggggcgucugugg

SEQ ID NO: 1310 - RNA, 20 nt, Artificial Sequence
  synthesized
gggcugaggggugucugugg

SEQ ID NO: 1311 - RNA, 20 nt, Artificial Sequence
  synthesized
gugucuguggggcacuguag

SEQ ID NO: 1312 - RNA, 20 nt, Artificial Sequence
  synthesized
ugaggggcgucuguggggca

SEQ ID NO: 1313 - RNA, 20 nt, Artificial Sequence
  synthesized
ugaggggugucuguggggca

SEQ ID NO: 1314 - RNA, 20 nt, Artificial Sequence
  synthesized
ugccccacagacaccccuca

SEQ ID NO: 1315 - RNA, 20 nt, Artificial Sequence
  synthesized
ugccccacagacgccccuca

SEQ ID NO: 1316 - RNA, 20 nt, Artificial Sequence
  synthesized
ugggaguggggcugaggggc

SEQ ID NO: 1317 - RNA, 20 nt, Artificial Sequence
  synthesized
ugggaguggggcugaggggu

SEQ ID NO: 1318 - RNA, 20 nt, Artificial Sequence
  synthesized
aaaaggagggggccuggcau

SEQ ID NO: 1319 - RNA, 20 nt, Artificial Sequence
  synthesized
aaaaggagggggcuuggcau

SEQ ID NO: 1320 - RNA, 20 nt, Artificial Sequence
  synthesized
aaagaaaaggagggggccug

SEQ ID NO: 1321 - RNA, 20 nt, Artificial Sequence
  synthesized
aaagaaaaggagggggcuug

SEQ ID NO: 1322 - RNA, 20 nt, Artificial Sequence
  synthesized
aaaggagggggcuuggcaua

SEQ ID NO: 1323 - RNA, 20 nt, Artificial Sequence
  synthesized
aagaaaaggagggggcuugg

SEQ ID NO: 1324 - RNA, 20 nt, Artificial Sequence
  synthesized
aagcccccuccuuuucuuuc

SEQ ID NO: 1325 - RNA, 20 nt, Artificial Sequence
  synthesized
agaaaaggagggggccuggc

SEQ ID NO: 1326 - RNA, 20 nt, Artificial Sequence
  synthesized
agaaaaggagggggcuuggc

SEQ ID NO: 1327 - RNA, 20 nt, Artificial Sequence
  synthesized
agcuaugccaagcccccucc

SEQ ID NO: 1328 - RNA, 20 nt, Artificial Sequence
  synthesized
agcuaugccaggcccccucc

SEQ ID NO: 1329 - RNA, 20 nt, Artificial Sequence
  synthesized
agggggccuggcauagcugg

SEQ ID NO: 1330 - RNA, 20 nt, Artificial Sequence
  synthesized
agggggcuuggcauagcugg

SEQ ID NO: 1331 - RNA, 20 nt, Artificial Sequence
  synthesized
augccaagcccccuccuuuu

SEQ ID NO: 1332 - RNA, 20 nt, Artificial Sequence
  synthesized
augccaggcccccuccuuuu

SEQ ID NO: 1333 - RNA, 20 nt, Artificial Sequence
  synthesized
cagcuaugccaagcccccuc

SEQ ID NO: 1334 - RNA, 20 nt, Artificial Sequence
  synthesized
ccaagcccccuccuuuucuu

SEQ ID NO: 1335 - RNA, 20 nt, Artificial Sequence
  synthesized
ccagcuaugccaagcccccu

SEQ ID NO: 1336 - RNA, 20 nt, Artificial Sequence
  synthesized
ccagcuaugccaggcccccu

SEQ ID NO: 1337 - RNA, 20 nt, Artificial Sequence
  synthesized
ccccuguccagcuaugccaa

SEQ ID NO: 1338 - RNA, 20 nt, Artificial Sequence
  synthesized
cccuguccagcuaugccaag

SEQ ID NO: 1339 - RNA, 20 nt, Artificial Sequence
  synthesized
cccuguccagcuaugccagg

SEQ ID NO: 1340 - RNA, 20 nt, Artificial Sequence
  synthesized
ccuggcauagcuggacaggg

SEQ ID NO: 1341 - RNA, 20 nt, Artificial Sequence
  synthesized
ccuguccagcuaugccaagc

SEQ ID NO: 1342 - RNA, 20 nt, Artificial Sequence
  synthesized
cuaugccaagcccccuccuu

SEQ ID NO: 1343 - RNA, 20 nt, Artificial Sequence
  synthesized
cuaugccaggcccccuccuu

SEQ ID NO: 1344 - RNA, 20 nt, Artificial Sequence
  synthesized
cuguccagcuaugccaagcc

SEQ ID NO: 1345 - RNA, 20 nt, Artificial Sequence
  synthesized
cuguccagcuaugccaggcc

SEQ ID NO: 1346 - RNA, 20 nt, Artificial Sequence
  synthesized
cuuggcauagcuggacaggg

SEQ ID NO: 1347 - RNA, 20 nt, Artificial Sequence
  synthesized
gaaaaggagggggcuuggca

SEQ ID NO: 1348 - RNA, 20 nt, Artificial Sequence
  synthesized
gaaagaaaaggagggggcuu

SEQ ID NO: 1349 - RNA, 20 nt, Artificial Sequence
  synthesized
gagggggcuuggcauagcug

SEQ ID NO: 1350 - RNA, 20 nt, Artificial Sequence
  synthesized
gccaagcccccuccuuuucu

SEQ ID NO: 1351 - RNA, 20 nt, Artificial Sequence
  synthesized
gccaggcccccuccuuuucu

SEQ ID NO: 1352 - RNA, 20 nt, Artificial Sequence
  synthesized
gcuaugccaagcccccuccu

SEQ ID NO: 1353 - RNA, 20 nt, Artificial Sequence
  synthesized
gggggcuuggcauagcugga

SEQ ID NO: 1354 - RNA, 20 nt, Artificial Sequence
  synthesized
guccagcuaugccaagcccc

SEQ ID NO: 1355 - RNA, 20 nt, Artificial Sequence
  synthesized
guccagcuaugccaggcccc

SEQ ID NO: 1356 - RNA, 20 nt, Artificial Sequence
  synthesized
uaugccaagcccccuccuuu

SEQ ID NO: 1357 - RNA, 20 nt, Artificial Sequence
  synthesized
uccagcuaugccaagccccc

SEQ ID NO: 1358 - RNA, 20 nt, Artificial Sequence
  synthesized
ugccaagcccccuccuuuuc

SEQ ID NO: 1359 - RNA, 20 nt, Artificial Sequence
  synthesized
uguccagcuaugccaagccc

SEQ ID NO: 1360 - RNA, 20 nt, Artificial Sequence
  synthesized
uuggcauagcuggacagggg

SEQ ID NO: 1361 - RNA, 20 nt, Artificial Sequence
  synthesized
aaaaaauacaaaucagcugg

SEQ ID NO: 1362 - RNA, 20 nt, Artificial Sequence
  synthesized
aaaauacaaaucagcugggc

SEQ ID NO: 1363 - RNA, 20 nt, Artificial Sequence
  synthesized
acaccacgacgcccagcuga

SEQ ID NO: 1364 - RNA, 20 nt, Artificial Sequence
  synthesized
acgcccagcugauuuguauu

SEQ ID NO: 1365 - RNA, 20 nt, Artificial Sequence
  synthesized
caaaucagcugggcgucgug

SEQ ID NO: 1366 - RNA, 20 nt, Artificial Sequence
  synthesized
cacgacgcccagcugauuug

SEQ ID NO: 1367 - RNA, 20 nt, Artificial Sequence
  synthesized
ccagcugauuuguauuuuuu

SEQ ID NO: 1368 - RNA, 20 nt, Artificial Sequence
  synthesized
ccagcugauuuuuguauuuu

SEQ ID NO: 1369 - RNA, 20 nt, Artificial Sequence
  synthesized
cgacgcccagcugauuugua

SEQ ID NO: 1370 - RNA, 20 nt, Artificial Sequence
  synthesized
gcccagcugauuuguauuuu

SEQ ID NO: 1371 - RNA, 20 nt, Artificial Sequence
  synthesized
accagacucaccccccucca

SEQ ID NO: 1372 - RNA, 20 nt, Artificial Sequence
  synthesized
accagacucaccccgcucca

SEQ ID NO: 1373 - RNA, 20 nt, Artificial Sequence
  synthesized
caccccccuccaccagcccc

SEQ ID NO: 1374 - RNA, 20 nt, Artificial Sequence
  synthesized
caccccgcuccaccagcccc

SEQ ID NO: 1375 - RNA, 20 nt, Artificial Sequence
  synthesized
cagacucaccccccuccacc

SEQ ID NO: 1376 - RNA, 20 nt, Artificial Sequence
  synthesized
cagacucaccccgcuccacc

SEQ ID NO: 1377 - RNA, 20 nt, Artificial Sequence
  synthesized
ccaccagacucaccccccuc

SEQ ID NO: 1378 - RNA, 20 nt, Artificial Sequence
  synthesized
ccaccagacucaccccgcuc

SEQ ID NO: 1379 - RNA, 20 nt, Artificial Sequence
  synthesized
ccccaccagacucacccccc

SEQ ID NO: 1380 - RNA, 20 nt, Artificial Sequence
  synthesized
ccccaccagacucaccccgc

SEQ ID NO: 1381 - RNA, 20 nt, Artificial Sequence
  synthesized
ccccccuccaccagccccgg

SEQ ID NO: 1382 - RNA, 20 nt, Artificial Sequence
  synthesized
ccccgcuccaccagccccgg

SEQ ID NO: 1383 - RNA, 20 nt, Artificial Sequence
  synthesized
ccccuccaccagccccggca

SEQ ID NO: 1384 - RNA, 20 nt, Artificial Sequence
  synthesized
ccgcuccaccagccccggca

SEQ ID NO: 1385 - RNA, 20 nt, Artificial Sequence
  synthesized
ccuccaccagccccggcagg

SEQ ID NO: 1386 - RNA, 20 nt, Artificial Sequence
  synthesized
cucaccccccuccaccagcc

SEQ ID NO: 1387 - RNA, 20 nt, Artificial Sequence
  synthesized
cucaccccgcuccaccagcc

SEQ ID NO: 1388 - RNA, 20 nt, Artificial Sequence
  synthesized
gacucaccccccuccaccag

SEQ ID NO: 1389 - RNA, 20 nt, Artificial Sequence
  synthesized
gacucaccccgcuccaccag

SEQ ID NO: 1390 - RNA, 20 nt, Artificial Sequence
  synthesized
gcuccaccagccccggcagg

SEQ ID NO: 1391 - RNA, 20 nt, Artificial Sequence
  synthesized
ggcugguggagcggggugag

SEQ ID NO: 1392 - RNA, 20 nt, Artificial Sequence
  synthesized
ggcugguggaggggggugag

SEQ ID NO: 1393 - RNA, 20 nt, Artificial Sequence
  synthesized
ggggcugguggagcggggug

SEQ ID NO: 1394 - RNA, 20 nt, Artificial Sequence
  synthesized
ggggcugguggaggggggug

SEQ ID NO: 1395 - RNA, 20 nt, Artificial Sequence
  synthesized
gguggagcggggugagucug

SEQ ID NO: 1396 - RNA, 20 nt, Artificial Sequence
  synthesized
gguggaggggggugagucug

SEQ ID NO: 1397 - RNA, 20 nt, Artificial Sequence
  synthesized
aaggccccaucacucucuga

SEQ ID NO: 1398 - RNA, 20 nt, Artificial Sequence
  synthesized
aaggccccaucgcucucuga

SEQ ID NO: 1399 - RNA, 20 nt, Artificial Sequence
  synthesized
agcgauggggccuugaugga

SEQ ID NO: 1400 - RNA, 20 nt, Artificial Sequence
  synthesized
agugauggggccuugaugga

SEQ ID NO: 1401 - RNA, 20 nt, Artificial Sequence
  synthesized
aucacucucugagagcaauu

SEQ ID NO: 1402 - RNA, 20 nt, Artificial Sequence
  synthesized
aucgcucucugagagcaauu

SEQ ID NO: 1403 - RNA, 20 nt, Artificial Sequence
  synthesized
cacucucugagagcaauuca

SEQ ID NO: 1404 - RNA, 20 nt, Artificial Sequence
  synthesized
caucaaggccccaucacucu

SEQ ID NO: 1405 - RNA, 20 nt, Artificial Sequence
  synthesized
caucaaggccccaucgcucu

SEQ ID NO: 1406 - RNA, 20 nt, Artificial Sequence
  synthesized
ccaucacucucugagagcaa

SEQ ID NO: 1407 - RNA, 20 nt, Artificial Sequence
  synthesized
ccaucgcucucugagagcaa

SEQ ID NO: 1408 - RNA, 20 nt, Artificial Sequence
  synthesized
ccccaucacucucugagagc

SEQ ID NO: 1409 - RNA, 20 nt, Artificial Sequence
  synthesized
ccccaucgcucucugagagc

SEQ ID NO: 1410 - RNA, 20 nt, Artificial Sequence
  synthesized
cgauggggccuugauggagc

SEQ ID NO: 1411 - RNA, 20 nt, Artificial Sequence
  synthesized
cgcucucugagagcaauuca

SEQ ID NO: 1412 - RNA, 20 nt, Artificial Sequence
  synthesized
gcuccaucaaggccccauca

SEQ ID NO: 1413 - RNA, 20 nt, Artificial Sequence
  synthesized
gcuccaucaaggccccaucg

SEQ ID NO: 1414 - RNA, 20 nt, Artificial Sequence
  synthesized
gcucucagagagcgaugggg

SEQ ID NO: 1415 - RNA, 20 nt, Artificial Sequence
  synthesized
gcucucagagagugaugggg

SEQ ID NO: 1416 - RNA, 20 nt, Artificial Sequence
  synthesized
ggccccaucacucucugaga

SEQ ID NO: 1417 - RNA, 20 nt, Artificial Sequence
  synthesized
ggccccaucgcucucugaga

SEQ ID NO: 1418 - RNA, 20 nt, Artificial Sequence
  synthesized
ucagagagcgauggggccuu

SEQ ID NO: 1419 - RNA, 20 nt, Artificial Sequence
  synthesized
ucagagagugauggggccuu

SEQ ID NO: 1420 - RNA, 20 nt, Artificial Sequence
  synthesized
uccaucaaggccccaucacu

SEQ ID NO: 1421 - RNA, 20 nt, Artificial Sequence
  synthesized
uccaucaaggccccaucgcu

SEQ ID NO: 1422 - RNA, 20 nt, Artificial Sequence
  synthesized
ucucagagagcgauggggcc

SEQ ID NO: 1423 - RNA, 20 nt, Artificial Sequence
  synthesized
ucucagagagugauggggcc

SEQ ID NO: 1424 - RNA, 20 nt, Artificial Sequence
  synthesized
ugaauugcucucagagagcg

SEQ ID NO: 1425 - RNA, 20 nt, Artificial Sequence
  synthesized
ugaauugcucucagagagug

SEQ ID NO: 1426 - RNA, 20 nt, Artificial Sequence
  synthesized
ugauggggccuugauggagc

SEQ ID NO: 1427 - RNA, 20 nt, Artificial Sequence
  synthesized
uugcucucagagagcgaugg

SEQ ID NO: 1428 - RNA, 20 nt, Artificial Sequence
  synthesized
uugcucucagagagugaugg

SEQ ID NO: 1429 - RNA, 20 nt, Artificial Sequence
  synthesized
aagcccuuccugccugacca

SEQ ID NO: 1430 - RNA, 20 nt, Artificial Sequence
  synthesized
aagggcgucauggggugugg

SEQ ID NO: 1431 - RNA, 20 nt, Artificial Sequence
  synthesized
aagggcuucauggggugugg

SEQ ID NO: 1432 - RNA, 20 nt, Artificial Sequence
  synthesized
acaccccaugaagcccuucc

SEQ ID NO: 1433 - RNA, 20 nt, Artificial Sequence
  synthesized
acaccccaugacgcccuucc

SEQ ID NO: 1434 - RNA, 20 nt, Artificial Sequence
  synthesized
acgcccuuccugccugacca

SEQ ID NO: 1435 - RNA, 20 nt, Artificial Sequence
  synthesized
auuuccacaccccaugaagc

SEQ ID NO: 1436 - RNA, 20 nt, Artificial Sequence
  synthesized
auuuccacaccccaugacgc

SEQ ID NO: 1437 - RNA, 20 nt, Artificial Sequence
  synthesized
caggaagggcgucauggggu

SEQ ID NO: 1438 - RNA, 20 nt, Artificial Sequence
  synthesized
caggaagggcuucauggggu

SEQ ID NO: 1439 - RNA, 20 nt, Artificial Sequence
  synthesized
caugaagcccuuccugccug

SEQ ID NO: 1440 - RNA, 20 nt, Artificial Sequence
  synthesized
caugacgcccuuccugccug

SEQ ID NO: 1441 - RNA, 20 nt, Artificial Sequence
  synthesized
ccacaccccaugaagcccuu

SEQ ID NO: 1442 - RNA, 20 nt, Artificial Sequence
  synthesized
ccacaccccaugacgcccuu

SEQ ID NO: 1443 - RNA, 20 nt, Artificial Sequence
  synthesized
cuauuuccacaccccaugaa

SEQ ID NO: 1444 - RNA, 20 nt, Artificial Sequence
  synthesized
cuauuuccacaccccaugac

SEQ ID NO: 1445 - RNA, 20 nt, Artificial Sequence
  synthesized
ggcaggaagggcgucauggg

SEQ ID NO: 1446 - RNA, 20 nt, Artificial Sequence
  synthesized
ggcaggaagggcuucauggg

SEQ ID NO: 1447 - RNA, 20 nt, Artificial Sequence
  synthesized
gggcgucaugggguguggaa

SEQ ID NO: 1448 - RNA, 20 nt, Artificial Sequence
  synthesized
gggcuucaugggguguggaa

SEQ ID NO: 1449 - RNA, 20 nt, Artificial Sequence
  synthesized
gucaugggguguggaaauag

SEQ ID NO: 1450 - RNA, 20 nt, Artificial Sequence
  synthesized
ugaagcccuuccugccugac

SEQ ID NO: 1451 - RNA, 20 nt, Artificial Sequence
  synthesized
ugacgcccuuccugccugac

SEQ ID NO: 1452 - RNA, 20 nt, Artificial Sequence
  synthesized
uggucaggcaggaagggcgu

SEQ ID NO: 1453 - RNA, 20 nt, Artificial Sequence
  synthesized
uggucaggcaggaagggcuu

SEQ ID NO: 1454 - RNA, 20 nt, Artificial Sequence
  synthesized
uucaugggguguggaaauag

SEQ ID NO: 1455 - RNA, 20 nt, Artificial Sequence
  synthesized
uuccacaccccaugaagccc

SEQ ID NO: 1456 - RNA, 20 nt, Artificial Sequence
  synthesized
uuccacaccccaugacgccc

SEQ ID NO: 1457 - RNA, 20 nt, Artificial Sequence
  synthesized
acaggcuguccuucgaguag

SEQ ID NO: 1458 - RNA, 20 nt, Artificial Sequence
  synthesized
acucgaaggacagccuauga

SEQ ID NO: 1459 - RNA, 20 nt, Artificial Sequence
  synthesized
acucgaaggacagccuguga

SEQ ID NO: 1460 - RNA, 20 nt, Artificial Sequence
  synthesized
aggacagccuaugaucagug

SEQ ID NO: 1461 - RNA, 20 nt, Artificial Sequence
  synthesized
aggacagccugugaucagug

SEQ ID NO: 1462 - RNA, 20 nt, Artificial Sequence
  synthesized
auaggcuguccuucgaguag

SEQ ID NO: 1463 - RNA, 20 nt, Artificial Sequence
  synthesized
aucacugaucacaggcuguc

SEQ ID NO: 1464 - RNA, 20 nt, Artificial Sequence
  synthesized
aucacugaucauaggcuguc

SEQ ID NO: 1465 - RNA, 20 nt, Artificial Sequence
  synthesized
augaucagugaugcagugga

SEQ ID NO: 1466 - RNA, 20 nt, Artificial Sequence
  synthesized
cacugcaucacugaucacag

SEQ ID NO: 1467 - RNA, 20 nt, Artificial Sequence
  synthesized
cacugcaucacugaucauag

SEQ ID NO: 1468 - RNA, 20 nt, Artificial Sequence
  synthesized
cuacucgaaggacagccuau

SEQ ID NO: 1469 - RNA, 20 nt, Artificial Sequence
  synthesized
cuacucgaaggacagccugu

SEQ ID NO: 1470 - RNA, 20 nt, Artificial Sequence
  synthesized
cuaugaucagugaugcagug

SEQ ID NO: 1471 - RNA, 20 nt, Artificial Sequence
  synthesized
cugaucacaggcuguccuuc

SEQ ID NO: 1472 - RNA, 20 nt, Artificial Sequence
  synthesized
cugaucauaggcuguccuuc

SEQ ID NO: 1473 - RNA, 20 nt, Artificial Sequence
  synthesized
cugcaucacugaucacaggc

SEQ ID NO: 1474 - RNA, 20 nt, Artificial Sequence
  synthesized
cugcaucacugaucauaggc

SEQ ID NO: 1475 - RNA, 20 nt, Artificial Sequence
  synthesized
cugugaucagugaugcagug

SEQ ID NO: 1476 - RNA, 20 nt, Artificial Sequence
  synthesized
gacagccuaugaucagugau

SEQ ID NO: 1477 - RNA, 20 nt, Artificial Sequence
  synthesized
gacagccugugaucagugau

SEQ ID NO: 1478 - RNA, 20 nt, Artificial Sequence
  synthesized
gaucacaggcuguccuucga

SEQ ID NO: 1479 - RNA, 20 nt, Artificial Sequence
  synthesized
gaucauaggcuguccuucga

SEQ ID NO: 1480 - RNA, 20 nt, Artificial Sequence
  synthesized
gcaucacugaucacaggcug

SEQ ID NO: 1481 - RNA, 20 nt, Artificial Sequence
  synthesized
gcaucacugaucauaggcug

SEQ ID NO: 1482 - RNA, 20 nt, Artificial Sequence
  synthesized
gugaucagugaugcagugga

SEQ ID NO: 1483 - RNA, 20 nt, Artificial Sequence
  synthesized
ucacaggcuguccuucgagu

SEQ ID NO: 1484 - RNA, 20 nt, Artificial Sequence
  synthesized
ucauaggcuguccuucgagu

SEQ ID NO: 1485 - RNA, 20 nt, Artificial Sequence
  synthesized
aacccaagccucaaacucug

SEQ ID NO: 1486 - RNA, 20 nt, Artificial Sequence
  synthesized
aacccaagucucaaacucug

SEQ ID NO: 1487 - RNA, 20 nt, Artificial Sequence
  synthesized
agcucaaacccaagccucaa

SEQ ID NO: 1488 - RNA, 20 nt, Artificial Sequence
  synthesized
agcucaaacccaagucucaa

SEQ ID NO: 1489 - RNA, 20 nt, Artificial Sequence
  synthesized
agggagcucaaacccaagcc

SEQ ID NO: 1490 - RNA, 20 nt, Artificial Sequence
  synthesized
agggagcucaaacccaaguc

SEQ ID NO: 1491 - RNA, 20 nt, Artificial Sequence
  synthesized
cccaagccucaaacucugga

SEQ ID NO: 1492 - RNA, 20 nt, Artificial Sequence
  synthesized
cccaagucucaaacucugga

SEQ ID NO: 1493 - RNA, 20 nt, Artificial Sequence
  synthesized
ccucaaacucuggauacaag

SEQ ID NO: 1494 - RNA, 20 nt, Artificial Sequence
  synthesized
cucaaacccaagccucaaac

SEQ ID NO: 1495 - RNA, 20 nt, Artificial Sequence
  synthesized
cucaaacccaagucucaaac

SEQ ID NO: 1496 - RNA, 20 nt, Artificial Sequence
  synthesized
cuuguauccagaguuugaga

SEQ ID NO: 1497 - RNA, 20 nt, Artificial Sequence
  synthesized
cuuguauccagaguuugagg

SEQ ID NO: 1498 - RNA, 20 nt, Artificial Sequence
  synthesized
gacuuggguuugagcucccu

SEQ ID NO: 1499 - RNA, 20 nt, Artificial Sequence
  synthesized
gaguuugagacuuggguuug

SEQ ID NO: 1500 - RNA, 20 nt, Artificial Sequence
  synthesized
gaguuugaggcuuggguuug

SEQ ID NO: 1501 - RNA, 20 nt, Artificial Sequence
  synthesized
ggagcucaaacccaagccuc

SEQ ID NO: 1502 - RNA, 20 nt, Artificial Sequence
  synthesized
ggagcucaaacccaagucuc

SEQ ID NO: 1503 - RNA, 20 nt, Artificial Sequence
  synthesized
ggcuuggguuugagcucccu

SEQ ID NO: 1504 - RNA, 20 nt, Artificial Sequence
  synthesized
guuugagacuuggguuugag

SEQ ID NO: 1505 - RNA, 20 nt, Artificial Sequence
  synthesized
guuugaggcuuggguuugag

SEQ ID NO: 1506 - RNA, 20 nt, Artificial Sequence
  synthesized
uauccagaguuugagacuug

SEQ ID NO: 1507 - RNA, 20 nt, Artificial Sequence
  synthesized
uauccagaguuugaggcuug

SEQ ID NO: 1508 - RNA, 20 nt, Artificial Sequence
  synthesized
uccagaguuugagacuuggg

SEQ ID NO: 1509 - RNA, 20 nt, Artificial Sequence
  synthesized
uccagaguuugaggcuuggg

SEQ ID NO: 1510 - RNA, 20 nt, Artificial Sequence
  synthesized
ucucaaacucuggauacaag

SEQ ID NO: 1511 - RNA, 20 nt, Artificial Sequence
  synthesized
uugagacuuggguuugagcu

SEQ ID NO: 1512 - RNA, 20 nt, Artificial Sequence
  synthesized
uugaggcuuggguuugagcu

SEQ ID NO: 1513 - RNA, 20 nt, Artificial Sequence
  synthesized
gaauuacuugaggucaggag

SEQ ID NO: 1514 - RNA, 20 nt, Artificial Sequence
  synthesized
cacuguacccggccaaccuc

SEQ ID NO: 1515 - RNA, 20 nt, Artificial Sequence
  synthesized
gagccacuguacccggccaa

SEQ ID NO: 1516 - RNA, 20 nt, Artificial Sequence
  synthesized
gagguuggccggguacagug

SEQ ID NO: 1517 - RNA, 20 nt, Artificial Sequence
  synthesized
gccacuguacccggccaacc

SEQ ID NO: 1518 - RNA, 20 nt, Artificial Sequence
  synthesized
guacccggccaaccucucuu

SEQ ID NO: 1519 - RNA, 20 nt, Artificial Sequence
  synthesized
aaagagagguuggccgggcg

SEQ ID NO: 1520 - RNA, 20 nt, Artificial Sequence
  synthesized
acugcgcccggccaaccucu

SEQ ID NO: 1521 - RNA, 20 nt, Artificial Sequence
  synthesized
agagagguuggccgggcgca

SEQ ID NO: 1522 - RNA, 20 nt, Artificial Sequence
  synthesized
agagguuggccgggcgcagu

SEQ ID NO: 1523 - RNA, 20 nt, Artificial Sequence
  synthesized
agccacugcgcccggccaac

SEQ ID NO: 1524 - RNA, 20 nt, Artificial Sequence
  synthesized
ccacugcgcccggccaaccu

SEQ ID NO: 1525 - RNA, 20 nt, Artificial Sequence
  synthesized
cgcccggccaaccucucuuu

SEQ ID NO: 1526 - RNA, 20 nt, Artificial Sequence
  synthesized
ugcgcccggccaaccucucu

SEQ ID NO: 1527 - RNA, 20 nt, Artificial Sequence
  synthesized
aaaaggucccgaacacuucc

SEQ ID NO: 1528 - RNA, 20 nt, Artificial Sequence
  synthesized
aaaaggucccggacacuucc

SEQ ID NO: 1529 - RNA, 20 nt, Artificial Sequence
  synthesized
aaguguccgggaccuuuucu

SEQ ID NO: 1530 - RNA, 20 nt, Artificial Sequence
  synthesized
aaguguucgggaccuuuucu

SEQ ID NO: 1531 - RNA, 20 nt, Artificial Sequence
  synthesized
agaaaaggucccgaacacuu

SEQ ID NO: 1532 - RNA, 20 nt, Artificial Sequence
  synthesized
agaaaaggucccggacacuu

SEQ ID NO: 1533 - RNA, 20 nt, Artificial Sequence
  synthesized
agggaaguguccgggaccuu

SEQ ID NO: 1534 - RNA, 20 nt, Artificial Sequence
  synthesized
agggaaguguucgggaccuu

SEQ ID NO: 1535 - RNA, 20 nt, Artificial Sequence
  synthesized
agugagaaaaggucccgaac

SEQ ID NO: 1536 - RNA, 20 nt, Artificial Sequence
  synthesized
agugagaaaaggucccggac

SEQ ID NO: 1537 - RNA, 20 nt, Artificial Sequence
  synthesized
ccgaacacuucccuaggauc

SEQ ID NO: 1538 - RNA, 20 nt, Artificial Sequence
  synthesized
ccggacacuucccuaggauc

SEQ ID NO: 1539 - RNA, 20 nt, Artificial Sequence
  synthesized
ccgggaccuuuucucacuuc

SEQ ID NO: 1540 - RNA, 20 nt, Artificial Sequence
  synthesized
cuagggaaguguccgggacc

SEQ ID NO: 1541 - RNA, 20 nt, Artificial Sequence
  synthesized
cuagggaaguguucgggacc

SEQ ID NO: 1542 - RNA, 20 nt, Artificial Sequence
  synthesized
gaagugagaaaaggucccga

SEQ ID NO: 1543 - RNA, 20 nt, Artificial Sequence
  synthesized
gaagugagaaaaggucccgg

SEQ ID NO: 1544 - RNA, 20 nt, Artificial Sequence
  synthesized
gauccuagggaaguguccgg

SEQ ID NO: 1545 - RNA, 20 nt, Artificial Sequence
  synthesized
gauccuagggaaguguucgg

SEQ ID NO: 1546 - RNA, 20 nt, Artificial Sequence
  synthesized
ggaaguguccgggaccuuuu

SEQ ID NO: 1547 - RNA, 20 nt, Artificial Sequence
  synthesized
ggaaguguucgggaccuuuu

SEQ ID NO: 1548 - RNA, 20 nt, Artificial Sequence
  synthesized
ggucccgaacacuucccuag

SEQ ID NO: 1549 - RNA, 20 nt, Artificial Sequence
  synthesized
ggucccggacacuucccuag

SEQ ID NO: 1550 - RNA, 20 nt, Artificial Sequence
  synthesized
guccgggaccuuuucucacu

SEQ ID NO: 1551 - RNA, 20 nt, Artificial Sequence
  synthesized
guucgggaccuuuucucacu

SEQ ID NO: 1552 - RNA, 20 nt, Artificial Sequence
  synthesized
ucccgaacacuucccuagga

SEQ ID NO: 1553 - RNA, 20 nt, Artificial Sequence
  synthesized
ucccggacacuucccuagga

SEQ ID NO: 1554 - RNA, 20 nt, Artificial Sequence
  synthesized
uccuagggaaguguccggga

SEQ ID NO: 1555 - RNA, 20 nt, Artificial Sequence
  synthesized
uccuagggaaguguucggga

SEQ ID NO: 1556 - RNA, 20 nt, Artificial Sequence
  synthesized
ucgggaccuuuucucacuuc

SEQ ID NO: 1557 - RNA, 20 nt, Artificial Sequence
  synthesized
ugagaaaaggucccgaacac

SEQ ID NO: 1558 - RNA, 20 nt, Artificial Sequence
  synthesized
ugagaaaaggucccggacac

SEQ ID NO: 1559 - RNA, 20 nt, Artificial Sequence
  synthesized
aggacaacacccccucuacc

SEQ ID NO: 1560 - RNA, 20 nt, Artificial Sequence
  synthesized
agggcaacacccccucuacc

SEQ ID NO: 1561 - RNA, 20 nt, Artificial Sequence
  synthesized
augguagaggggguguugcc

SEQ ID NO: 1562 - RNA, 20 nt, Artificial Sequence
  synthesized
augguagaggggguguuguc

SEQ ID NO: 1563 - RNA, 20 nt, Artificial Sequence
  synthesized
auuuaggacaacacccccuc

SEQ ID NO: 1564 - RNA, 20 nt, Artificial Sequence
  synthesized
auuuagggcaacacccccuc

SEQ ID NO: 1565 - RNA, 20 nt, Artificial Sequence
  synthesized
cagggcuggaauuuaggaca

SEQ ID NO: 1566 - RNA, 20 nt, Artificial Sequence
  synthesized
cagggcuggaauuuagggca

SEQ ID NO: 1567 - RNA, 20 nt, Artificial Sequence
  synthesized
gaauuuaggacaacaccccc

SEQ ID NO: 1568 - RNA, 20 nt, Artificial Sequence
  synthesized
gaauuuagggcaacaccccc

SEQ ID NO: 1569 - RNA, 20 nt, Artificial Sequence
  synthesized
gacaacacccccucuaccau

SEQ ID NO: 1570 - RNA, 20 nt, Artificial Sequence
  synthesized
gcuggaauuuaggacaacac

SEQ ID NO: 1571 - RNA, 20 nt, Artificial Sequence
  synthesized
gcuggaauuuagggcaacac

SEQ ID NO: 1572 - RNA, 20 nt, Artificial Sequence
  synthesized
ggcaacacccccucuaccau

SEQ ID NO: 1573 - RNA, 20 nt, Artificial Sequence
  synthesized
gggcuggaauuuaggacaac

SEQ ID NO: 1574 - RNA, 20 nt, Artificial Sequence
  synthesized
gggcuggaauuuagggcaac

SEQ ID NO: 1575 - RNA, 20 nt, Artificial Sequence
  synthesized
ggggguguugcccuaaauuc

SEQ ID NO: 1576 - RNA, 20 nt, Artificial Sequence
  synthesized
ggggguguuguccuaaauuc

SEQ ID NO: 1577 - RNA, 20 nt, Artificial Sequence
  synthesized
ggguguugcccuaaauucca

SEQ ID NO: 1578 - RNA, 20 nt, Artificial Sequence
  synthesized
ggguguuguccuaaauucca

SEQ ID NO: 1579 - RNA, 20 nt, Artificial Sequence
  synthesized
gguagaggggguguugcccu

SEQ ID NO: 1580 - RNA, 20 nt, Artificial Sequence
  synthesized
gguagaggggguguuguccu

SEQ ID NO: 1581 - RNA, 20 nt, Artificial Sequence
  synthesized
uagaggggguguugcccuaa

SEQ ID NO: 1582 - RNA, 20 nt, Artificial Sequence
  synthesized
uagaggggguguuguccuaa

SEQ ID NO: 1583 - RNA, 20 nt, Artificial Sequence
  synthesized
ugcccuaaauuccagcccug

SEQ ID NO: 1584 - RNA, 20 nt, Artificial Sequence
  synthesized
uggaauuuaggacaacaccc

SEQ ID NO: 1585 - RNA, 20 nt, Artificial Sequence
  synthesized
uggaauuuagggcaacaccc

SEQ ID NO: 1586 - RNA, 20 nt, Artificial Sequence
  synthesized
uguccuaaauuccagcccug

SEQ ID NO: 1587 - RNA, 20 nt, Artificial Sequence
  synthesized
uuaggacaacacccccucua

SEQ ID NO: 1588 - RNA, 20 nt, Artificial Sequence
  synthesized
uuagggcaacacccccucua

SEQ ID NO: 1589 - RNA, 20 nt, Artificial Sequence
  synthesized
acucagccucagacuacagg

SEQ ID NO: 1590 - RNA, 20 nt, Artificial Sequence
  synthesized
acucagccucagacugcagg

SEQ ID NO: 1591 - RNA, 20 nt, Artificial Sequence
  synthesized
auacucagccucagacuaca

SEQ ID NO: 1592 - RNA, 20 nt, Artificial Sequence
  synthesized
auacucagccucagacugca

SEQ ID NO: 1593 - RNA, 20 nt, Artificial Sequence
  synthesized
ccugcagucugaggcugagu

SEQ ID NO: 1594 - RNA, 20 nt, Artificial Sequence
  synthesized
ccuguagucugaggcugagu

SEQ ID NO: 1595 - RNA, 20 nt, Artificial Sequence
  synthesized
cgauacucagccucagacua

SEQ ID NO: 1596 - RNA, 20 nt, Artificial Sequence
  synthesized
cgauacucagccucagacug

SEQ ID NO: 1597 - RNA, 20 nt, Artificial Sequence
  synthesized
ggcgugugccugcagucuga

SEQ ID NO: 1598 - RNA, 20 nt, Artificial Sequence
  synthesized
ggcgugugccuguagucuga

SEQ ID NO: 1599 - RNA, 20 nt, Artificial Sequence
  synthesized
ucagccucagacuacaggca

SEQ ID NO: 1600 - RNA, 20 nt, Artificial Sequence
  synthesized
ucagccucagacugcaggca

SEQ ID NO: 1601 - RNA, 20 nt, Artificial Sequence
  synthesized
ugccugcagucugaggcuga

SEQ ID NO: 1602 - RNA, 20 nt, Artificial Sequence
  synthesized
ugccuguagucugaggcuga

SEQ ID NO: 1603 - RNA, 20 nt, Artificial Sequence
  synthesized
ugugccugcagucugaggcu

SEQ ID NO: 1604 - RNA, 20 nt, Artificial Sequence
  synthesized
ugugccuguagucugaggcu

SEQ ID NO: 1605 - RNA, 20 nt, Artificial Sequence
  synthesized
aaucuugucuugggaugggu

SEQ ID NO: 1606 - RNA, 20 nt, Artificial Sequence
  synthesized
aaucuugucuugggcugggu

SEQ ID NO: 1607 - RNA, 20 nt, Artificial Sequence
  synthesized
acacccagcccaagacaaga

SEQ ID NO: 1608 - RNA, 20 nt, Artificial Sequence
  synthesized
acacccaucccaagacaaga

SEQ ID NO: 1609 - RNA, 20 nt, Artificial Sequence
  synthesized
acccagcccaagacaagauu

SEQ ID NO: 1610 - RNA, 20 nt, Artificial Sequence
  synthesized
acccaucccaagacaagauu

SEQ ID NO: 1611 - RNA, 20 nt, Artificial Sequence
  synthesized
agaaucuugucuugggaugg

SEQ ID NO: 1612 - RNA, 20 nt, Artificial Sequence
  synthesized
agaaucuugucuugggcugg

SEQ ID NO: 1613 - RNA, 20 nt, Artificial Sequence
  synthesized
agcccaagacaagauucuua

SEQ ID NO: 1614 - RNA, 20 nt, Artificial Sequence
  synthesized
aucccaagacaagauucuua

SEQ ID NO: 1615 - RNA, 20 nt, Artificial Sequence
  synthesized
auggguguggaggcaagugg

SEQ ID NO: 1616 - RNA, 20 nt, Artificial Sequence
  synthesized
ccacacccagcccaagacaa

SEQ ID NO: 1617 - RNA, 20 nt, Artificial Sequence
  synthesized
ccacacccaucccaagacaa

SEQ ID NO: 1618 - RNA, 20 nt, Artificial Sequence
  synthesized
ccacuugccuccacacccag

SEQ ID NO: 1619 - RNA, 20 nt, Artificial Sequence
  synthesized
ccacuugccuccacacccau

SEQ ID NO: 1620 - RNA, 20 nt, Artificial Sequence
  synthesized
ccagcccaagacaagauucu

SEQ ID NO: 1621 - RNA, 20 nt, Artificial Sequence
  synthesized
ccaucccaagacaagauucu

SEQ ID NO: 1622 - RNA, 20 nt, Artificial Sequence
  synthesized
cuccacacccagcccaagac

SEQ ID NO: 1623 - RNA, 20 nt, Artificial Sequence
  synthesized
cuccacacccaucccaagac

SEQ ID NO: 1624 - RNA, 20 nt, Artificial Sequence
  synthesized
cuugggauggguguggaggc

SEQ ID NO: 1625 - RNA, 20 nt, Artificial Sequence
  synthesized
cuugggcuggguguggaggc

SEQ ID NO: 1626 - RNA, 20 nt, Artificial Sequence
  synthesized
gucuugggauggguguggag

SEQ ID NO: 1627 - RNA, 20 nt, Artificial Sequence
  synthesized
gucuugggcuggguguggag

SEQ ID NO: 1628 - RNA, 20 nt, Artificial Sequence
  synthesized
aauggggaugagcuggaugu

SEQ ID NO: 1629 - RNA, 20 nt, Artificial Sequence
  synthesized
aauggggaugagcuguaugu

SEQ ID NO: 1630 - RNA, 20 nt, Artificial Sequence
  synthesized
acagcuacauacagcucauc

SEQ ID NO: 1631 - RNA, 20 nt, Artificial Sequence
  synthesized
acagcuacauccagcucauc

SEQ ID NO: 1632 - RNA, 20 nt, Artificial Sequence
  synthesized
acagcucauccccauuuccu

SEQ ID NO: 1633 - RNA, 20 nt, Artificial Sequence
  synthesized
acauacagcucauccccauu

SEQ ID NO: 1634 - RNA, 20 nt, Artificial Sequence
  synthesized
agcuacauacagcucauccc

SEQ ID NO: 1635 - RNA, 20 nt, Artificial Sequence
  synthesized
agcuacauccagcucauccc

SEQ ID NO: 1636 - RNA, 20 nt, Artificial Sequence
  synthesized
agcuguauguagcugucgca

SEQ ID NO: 1637 - RNA, 20 nt, Artificial Sequence
  synthesized
aggaaauggggaugagcugu

SEQ ID NO: 1638 - RNA, 20 nt, Artificial Sequence
  synthesized
auacagcucauccccauuuc

SEQ ID NO: 1639 - RNA, 20 nt, Artificial Sequence
  synthesized
auccagcucauccccauuuc

SEQ ID NO: 1640 - RNA, 20 nt, Artificial Sequence
  synthesized
auugcgacagcuacauacag

SEQ ID NO: 1641 - RNA, 20 nt, Artificial Sequence
  synthesized
auugcgacagcuacauccag

SEQ ID NO: 1642 - RNA, 20 nt, Artificial Sequence
  synthesized
ccagcucauccccauuuccu

SEQ ID NO: 1643 - RNA, 20 nt, Artificial Sequence
  synthesized
cgacagcuacauacagcuca

SEQ ID NO: 1644 - RNA, 20 nt, Artificial Sequence
  synthesized
cgacagcuacauccagcuca

SEQ ID NO: 1645 - RNA, 20 nt, Artificial Sequence
  synthesized
cuacauacagcucaucccca

SEQ ID NO: 1646 - RNA, 20 nt, Artificial Sequence
  synthesized
cuacauccagcucaucccca

SEQ ID NO: 1647 - RNA, 20 nt, Artificial Sequence
  synthesized
cuguauguagcugucgcaau

SEQ ID NO: 1648 - RNA, 20 nt, Artificial Sequence
  synthesized
gaaauggggaugagcuggau

SEQ ID NO: 1649 - RNA, 20 nt, Artificial Sequence
  synthesized
gaaauggggaugagcuguau

SEQ ID NO: 1650 - RNA, 20 nt, Artificial Sequence
  synthesized
gggaugagcuggauguagcu

SEQ ID NO: 1651 - RNA, 20 nt, Artificial Sequence
  synthesized
gggaugagcuguauguagcu

SEQ ID NO: 1652 - RNA, 20 nt, Artificial Sequence
  synthesized
guauugcgacagcuacauac

SEQ ID NO: 1653 - RNA, 20 nt, Artificial Sequence
  synthesized
ugagcuggauguagcugucg

SEQ ID NO: 1654 - RNA, 20 nt, Artificial Sequence
  synthesized
ugagcuguauguagcugucg

SEQ ID NO: 1655 - RNA, 20 nt, Artificial Sequence
  synthesized
ugcgacagcuacauacagcu

SEQ ID NO: 1656 - RNA, 20 nt, Artificial Sequence
  synthesized
ugcgacagcuacauccagcu

SEQ ID NO: 1657 - RNA, 20 nt, Artificial Sequence
  synthesized
uggggaugagcuggauguag

SEQ ID NO: 1658 - RNA, 20 nt, Artificial Sequence
  synthesized
uggggaugagcuguauguag

SEQ ID NO: 1659 - RNA, 20 nt, Artificial Sequence
  synthesized
aaggagagguggugccgauc

SEQ ID NO: 1660 - RNA, 20 nt, Artificial Sequence
  synthesized
aaggagagguggugccgcuc

SEQ ID NO: 1661 - RNA, 20 nt, Artificial Sequence
  synthesized
aaggcagagcggcaccaccu

SEQ ID NO: 1662 - RNA, 20 nt, Artificial Sequence
  synthesized
aaggcagaucggcaccaccu

SEQ ID NO: 1663 - RNA, 20 nt, Artificial Sequence
  synthesized
agaaggcagagcggcaccac

SEQ ID NO: 1664 - RNA, 20 nt, Artificial Sequence
  synthesized
agaaggcagaucggcaccac

SEQ ID NO: 1665 - RNA, 20 nt, Artificial Sequence
  synthesized
agagguggugccgaucugcc

SEQ ID NO: 1666 - RNA, 20 nt, Artificial Sequence
  synthesized
agagguggugccgcucugcc

SEQ ID NO: 1667 - RNA, 20 nt, Artificial Sequence
  synthesized
agguggugccgaucugccuu

SEQ ID NO: 1668 - RNA, 20 nt, Artificial Sequence
  synthesized
agguggugccgcucugccuu

SEQ ID NO: 1669 - RNA, 20 nt, Artificial Sequence
  synthesized
auaaggagagguggugccga

SEQ ID NO: 1670 - RNA, 20 nt, Artificial Sequence
  synthesized
auaaggagagguggugccgc

SEQ ID NO: 1671 - RNA, 20 nt, Artificial Sequence
  synthesized
cagagcggcaccaccucucc

SEQ ID NO: 1672 - RNA, 20 nt, Artificial Sequence
  synthesized
cagaucggcaccaccucucc

SEQ ID NO: 1673 - RNA, 20 nt, Artificial Sequence
  synthesized
ccgaucugccuucuaaaggg

SEQ ID NO: 1674 - RNA, 20 nt, Artificial Sequence
  synthesized
ccgcucugccuucuaaaggg

SEQ ID NO: 1675 - RNA, 20 nt, Artificial Sequence
  synthesized
cuuuagaaggcagagcggca

SEQ ID NO: 1676 - RNA, 20 nt, Artificial Sequence
  synthesized
cuuuagaaggcagaucggca

SEQ ID NO: 1677 - RNA, 20 nt, Artificial Sequence
  synthesized
gagcggcaccaccucuccuu

SEQ ID NO: 1678 - RNA, 20 nt, Artificial Sequence
  synthesized
gaucggcaccaccucuccuu

SEQ ID NO: 1679 - RNA, 20 nt, Artificial Sequence
  synthesized
gcggcaccaccucuccuuau

SEQ ID NO: 1680 - RNA, 20 nt, Artificial Sequence
  synthesized
ggagagguggugccgaucug

SEQ ID NO: 1681 - RNA, 20 nt, Artificial Sequence
  synthesized
ggagagguggugccgcucug

SEQ ID NO: 1682 - RNA, 20 nt, Artificial Sequence
  synthesized
ggcagagcggcaccaccucu

SEQ ID NO: 1683 - RNA, 20 nt, Artificial Sequence
  synthesized
ggcagaucggcaccaccucu

SEQ ID NO: 1684 - RNA, 20 nt, Artificial Sequence
  synthesized
guggugccgaucugccuucu

SEQ ID NO: 1685 - RNA, 20 nt, Artificial Sequence
  synthesized
guggugccgcucugccuucu

SEQ ID NO: 1686 - RNA, 20 nt, Artificial Sequence
  synthesized
ucggcaccaccucuccuuau

SEQ ID NO: 1687 - RNA, 20 nt, Artificial Sequence
  synthesized
ugcccuuuagaaggcagagc

SEQ ID NO: 1688 - RNA, 20 nt, Artificial Sequence
  synthesized
ugccgcucugccuucuaaag

SEQ ID NO: 1689 - RNA, 20 nt, Artificial Sequence
  synthesized
uuagaaggcagagcggcacc

SEQ ID NO: 1690 - RNA, 20 nt, Artificial Sequence
  synthesized
uuagaaggcagaucggcacc

SEQ ID NO: 1691 - RNA, 20 nt, Artificial Sequence
  synthesized
aauagcuaaugcacgcaagg

SEQ ID NO: 1692 - RNA, 20 nt, Artificial Sequence
  synthesized
agccuugcgugcauuagcua

SEQ ID NO: 1693 - RNA, 20 nt, Artificial Sequence
  synthesized
caaauagcuaaugcacgcaa

SEQ ID NO: 1694 - RNA, 20 nt, Artificial Sequence
  synthesized
ccuugcgugcauuagcuauu

SEQ ID NO: 1695 - RNA, 20 nt, Artificial Sequence
  synthesized
gacaaauagcuaaugcacgc

SEQ ID NO: 1696 - RNA, 20 nt, Artificial Sequence
  synthesized
gcuaaugcacgcaaggcuua

SEQ ID NO: 1697 - RNA, 20 nt, Artificial Sequence
  synthesized
uaagccuugcgugcauuagc

SEQ ID NO: 1698 - RNA, 20 nt, Artificial Sequence
  synthesized
aacaacugacccuuggaugc

SEQ ID NO: 1699 - RNA, 20 nt, Artificial Sequence
  synthesized
aacaacugacccuuggcugc

SEQ ID NO: 1700 - RNA, 20 nt, Artificial Sequence
  synthesized
acccuuggaugcauucaaag

SEQ ID NO: 1701 - RNA, 20 nt, Artificial Sequence
  synthesized
acccuuggcugcauucaaag

SEQ ID NO: 1702 - RNA, 20 nt, Artificial Sequence
  synthesized
acugacccuuggaugcauuc

SEQ ID NO: 1703 - RNA, 20 nt, Artificial Sequence
  synthesized
acugacccuuggcugcauuc

SEQ ID NO: 1704 - RNA, 20 nt, Artificial Sequence
  synthesized
agccaagggucaguuguuua

SEQ ID NO: 1705 - RNA, 20 nt, Artificial Sequence
  synthesized
auccaagggucaguuguuua

SEQ ID NO: 1706 - RNA, 20 nt, Artificial Sequence
  synthesized
augcagccaagggucaguug

SEQ ID NO: 1707 - RNA, 20 nt, Artificial Sequence
  synthesized
augcauccaagggucaguug

SEQ ID NO: 1708 - RNA, 20 nt, Artificial Sequence
  synthesized
augcauucaaaggaucaggg

SEQ ID NO: 1709 - RNA, 20 nt, Artificial Sequence
  synthesized
caacugacccuuggaugcau

SEQ ID NO: 1710 - RNA, 20 nt, Artificial Sequence
  synthesized
caacugacccuuggcugcau

SEQ ID NO: 1711 - RNA, 20 nt, Artificial Sequence
  synthesized
cccugauccuuugaaugcag

SEQ ID NO: 1712 - RNA, 20 nt, Artificial Sequence
  synthesized
cccugauccuuugaaugcau

SEQ ID NO: 1713 - RNA, 20 nt, Artificial Sequence
  synthesized
ccuuggaugcauucaaagga

SEQ ID NO: 1714 - RNA, 20 nt, Artificial Sequence
  synthesized
ccuuggcugcauucaaagga

SEQ ID NO: 1715 - RNA, 20 nt, Artificial Sequence
  synthesized
cugcauucaaaggaucaggg

SEQ ID NO: 1716 - RNA, 20 nt, Artificial Sequence
  synthesized
cuuugaaugcagccaagggu

SEQ ID NO: 1717 - RNA, 20 nt, Artificial Sequence
  synthesized
cuuugaaugcauccaagggu

SEQ ID NO: 1718 - RNA, 20 nt, Artificial Sequence
  synthesized
gaaugcagccaagggucagu

SEQ ID NO: 1719 - RNA, 20 nt, Artificial Sequence
  synthesized
gaaugcauccaagggucagu

SEQ ID NO: 1720 - RNA, 20 nt, Artificial Sequence
  synthesized
gcagccaagggucaguuguu

SEQ ID NO: 1721 - RNA, 20 nt, Artificial Sequence
  synthesized
gcauccaagggucaguuguu

SEQ ID NO: 1722 - RNA, 20 nt, Artificial Sequence
  synthesized
uaaacaacugacccuuggau

SEQ ID NO: 1723 - RNA, 20 nt, Artificial Sequence
  synthesized
uaaacaacugacccuuggcu

SEQ ID NO: 1724 - RNA, 20 nt, Artificial Sequence
  synthesized
uccuuugaaugcagccaagg

SEQ ID NO: 1725 - RNA, 20 nt, Artificial Sequence
  synthesized
uccuuugaaugcauccaagg

SEQ ID NO: 1726 - RNA, 20 nt, Artificial Sequence
  synthesized
uugaaugcagccaaggguca

SEQ ID NO: 1727 - RNA, 20 nt, Artificial Sequence
  synthesized
uugaaugcauccaaggguca

SEQ ID NO: 1728 - RNA, 20 nt, Artificial Sequence
  synthesized
acugcccuugagccugggua

SEQ ID NO: 1729 - RNA, 20 nt, Artificial Sequence
  synthesized
acugugccacugcccuugag

SEQ ID NO: 1730 - RNA, 20 nt, Artificial Sequence
  synthesized
acugugccgcugcccuugag

SEQ ID NO: 1731 - RNA, 20 nt, Artificial Sequence
  synthesized
agggcagcggcacagucaug

SEQ ID NO: 1732 - RNA, 20 nt, Artificial Sequence
  synthesized
caggcucaagggcagcggca

SEQ ID NO: 1733 - RNA, 20 nt, Artificial Sequence
  synthesized
caggcucaagggcaguggca

SEQ ID NO: 1734 - RNA, 20 nt, Artificial Sequence
  synthesized
ccacugcccuugagccuggg

SEQ ID NO: 1735 - RNA, 20 nt, Artificial Sequence
  synthesized
ccgcugcccuugagccuggg

SEQ ID NO: 1736 - RNA, 20 nt, Artificial Sequence
  synthesized
cucaagggcagcggcacagu

SEQ ID NO: 1737 - RNA, 20 nt, Artificial Sequence
  synthesized
gagucaugacugugccgcug

SEQ ID NO: 1738 - RNA, 20 nt, Artificial Sequence
  synthesized
gcugcccuugagccugggua

SEQ ID NO: 1739 - RNA, 20 nt, Artificial Sequence
  synthesized
ggcagcggcacagucaugac

SEQ ID NO: 1740 - RNA, 20 nt, Artificial Sequence
  synthesized
ggcucaagggcagcggcaca

SEQ ID NO: 1741 - RNA, 20 nt, Artificial Sequence
  synthesized
ggcucaagggcaguggcaca

SEQ ID NO: 1742 - RNA, 20 nt, Artificial Sequence
  synthesized
gucaugacugugccgcugcc

SEQ ID NO: 1743 - RNA, 20 nt, Artificial Sequence
  synthesized
gugagucaugacugugccgc

SEQ ID NO: 1744 - RNA, 20 nt, Artificial Sequence
  synthesized
uacccaggcucaagggcagc

SEQ ID NO: 1745 - RNA, 20 nt, Artificial Sequence
  synthesized
ugacugugccacugcccuug

SEQ ID NO: 1746 - RNA, 20 nt, Artificial Sequence
  synthesized
ugacugugccgcugcccuug

SEQ ID NO: 1747 - RNA, 20 nt, Artificial Sequence
  synthesized
aacgucuaacuucaguuuca

SEQ ID NO: 1748 - RNA, 20 nt, Artificial Sequence
  synthesized
aacgucuaacuucaguuucu

SEQ ID NO: 1749 - RNA, 20 nt, Artificial Sequence
  synthesized
acuucaguuucacuggcugc

SEQ ID NO: 1750 - RNA, 20 nt, Artificial Sequence
  synthesized
acuucaguuucucuggcugc

SEQ ID NO: 1751 - RNA, 20 nt, Artificial Sequence
  synthesized
agccagagaaacugaaguua

SEQ ID NO: 1752 - RNA, 20 nt, Artificial Sequence
  synthesized
agccagugaaacugaaguua

SEQ ID NO: 1753 - RNA, 20 nt, Artificial Sequence
  synthesized
cacuggcugcaguccgcacc

SEQ ID NO: 1754 - RNA, 20 nt, Artificial Sequence
  synthesized
caguuucacuggcugcaguc

SEQ ID NO: 1755 - RNA, 20 nt, Artificial Sequence
  synthesized
caguuucucuggcugcaguc

SEQ ID NO: 1756 - RNA, 20 nt, Artificial Sequence
  synthesized
ccagagaaacugaaguuaga

SEQ ID NO: 1757 - RNA, 20 nt, Artificial Sequence
  synthesized
ccagugaaacugaaguuaga

SEQ ID NO: 1758 - RNA, 20 nt, Artificial Sequence
  synthesized
cgucuaacuucaguuucacu

SEQ ID NO: 1759 - RNA, 20 nt, Artificial Sequence
  synthesized
cgucuaacuucaguuucucu

SEQ ID NO: 1760 - RNA, 20 nt, Artificial Sequence
  synthesized
cucuggcugcaguccgcacc

SEQ ID NO: 1761 - RNA, 20 nt, Artificial Sequence
  synthesized
cugcagccagagaaacugaa

SEQ ID NO: 1762 - RNA, 20 nt, Artificial Sequence
  synthesized
cugcagccagugaaacugaa

SEQ ID NO: 1763 - RNA, 20 nt, Artificial Sequence
  synthesized
gacugcagccagagaaacug

SEQ ID NO: 1764 - RNA, 20 nt, Artificial Sequence
  synthesized
gacugcagccagugaaacug

SEQ ID NO: 1765 - RNA, 20 nt, Artificial Sequence
  synthesized
gcagccagagaaacugaagu

SEQ ID NO: 1766 - RNA, 20 nt, Artificial Sequence
  synthesized
gcagccagugaaacugaagu

SEQ ID NO: 1767 - RNA, 20 nt, Artificial Sequence
  synthesized
ggugcggacugcagccagag

SEQ ID NO: 1768 - RNA, 20 nt, Artificial Sequence
  synthesized
ggugcggacugcagccagug

SEQ ID NO: 1769 - RNA, 20 nt, Artificial Sequence
  synthesized
guuucacuggcugcaguccg

SEQ ID NO: 1770 - RNA, 20 nt, Artificial Sequence
  synthesized
guuucucuggcugcaguccg

SEQ ID NO: 1771 - RNA, 20 nt, Artificial Sequence
  synthesized
uaacuucaguuucacuggcu

SEQ ID NO: 1772 - RNA, 20 nt, Artificial Sequence
  synthesized
uaacuucaguuucucuggcu

SEQ ID NO: 1773 - RNA, 20 nt, Artificial Sequence
  synthesized
ucuaacuucaguuucacugg

SEQ ID NO: 1774 - RNA, 20 nt, Artificial Sequence
  synthesized
ucuaacuucaguuucucugg

SEQ ID NO: 1775 - RNA, 20 nt, Artificial Sequence
  synthesized
ugcggacugcagccagagaa

SEQ ID NO: 1776 - RNA, 20 nt, Artificial Sequence
  synthesized
ugcggacugcagccagugaa

SEQ ID NO: 1777 - RNA, 20 nt, Artificial Sequence
  synthesized
uucacuggcugcaguccgca

SEQ ID NO: 1778 - RNA, 20 nt, Artificial Sequence
  synthesized
uucaguuucacuggcugcag

SEQ ID NO: 1779 - RNA, 20 nt, Artificial Sequence
  synthesized
uucaguuucucuggcugcag

SEQ ID NO: 1780 - RNA, 20 nt, Artificial Sequence
  synthesized
uucucuggcugcaguccgca

SEQ ID NO: 1781 - RNA, 20 nt, Artificial Sequence
  synthesized
aggcuaggcgugguggcucu

SEQ ID NO: 1782 - RNA, 20 nt, Artificial Sequence
  synthesized
aggcuaggcgugguggcugu

SEQ ID NO: 1783 - RNA, 20 nt, Artificial Sequence
  synthesized
caggcgacagccaccacgcc

SEQ ID NO: 1784 - RNA, 20 nt, Artificial Sequence
  synthesized
cgugguggcucucgccugua

SEQ ID NO: 1785 - RNA, 20 nt, Artificial Sequence
  synthesized
gcuaggcgugguggcugucg

SEQ ID NO: 1786 - RNA, 20 nt, Artificial Sequence
  synthesized
ggauuacaggcgagagccac

SEQ ID NO: 1787 - RNA, 20 nt, Artificial Sequence
  synthesized
ggcgacagccaccacgccua

SEQ ID NO: 1788 - RNA, 20 nt, Artificial Sequence
  synthesized
ggcgagagccaccacgccua

SEQ ID NO: 1789 - RNA, 20 nt, Artificial Sequence
  synthesized
ggcucucgccuguaauccca

SEQ ID NO: 1790 - RNA, 20 nt, Artificial Sequence
  synthesized
aaucuugaccacaccccacu

SEQ ID NO: 1791 - RNA, 20 nt, Artificial Sequence
  synthesized
aaucuugacuacaccccacu

SEQ ID NO: 1792 - RNA, 20 nt, Artificial Sequence
  synthesized
agucaagauuugggggucca

SEQ ID NO: 1793 - RNA, 20 nt, Artificial Sequence
  synthesized
caaaucuugaccacacccca

SEQ ID NO: 1794 - RNA, 20 nt, Artificial Sequence
  synthesized
caaaucuugacuacacccca

SEQ ID NO: 1795 - RNA, 20 nt, Artificial Sequence
  synthesized
caggagugggguguagucaa

SEQ ID NO: 1796 - RNA, 20 nt, Artificial Sequence
  synthesized
caggagugggguguggucaa

SEQ ID NO: 1797 - RNA, 20 nt, Artificial Sequence
  synthesized
ccacaccccacuccuggcuc

SEQ ID NO: 1798 - RNA, 20 nt, Artificial Sequence
  synthesized
cccaaaucuugaccacaccc

SEQ ID NO: 1799 - RNA, 20 nt, Artificial Sequence
  synthesized
cccaaaucuugacuacaccc

SEQ ID NO: 1800 - RNA, 20 nt, Artificial Sequence
  synthesized
cccccaaaucuugaccacac

SEQ ID NO: 1801 - RNA, 20 nt, Artificial Sequence
  synthesized
cccccaaaucuugacuacac

SEQ ID NO: 1802 - RNA, 20 nt, Artificial Sequence
  synthesized
cuacaccccacuccuggcuc

SEQ ID NO: 1803 - RNA, 20 nt, Artificial Sequence
  synthesized
gaccacaccccacuccuggc

SEQ ID NO: 1804 - RNA, 20 nt, Artificial Sequence
  synthesized
gacccccaaaucuugaccac

SEQ ID NO: 1805 - RNA, 20 nt, Artificial Sequence
  synthesized
gacccccaaaucuugacuac

SEQ ID NO: 1806 - RNA, 20 nt, Artificial Sequence
  synthesized
gacuacaccccacuccuggc

SEQ ID NO: 1807 - RNA, 20 nt, Artificial Sequence
  synthesized
gccaggagugggguguaguc

SEQ ID NO: 1808 - RNA, 20 nt, Artificial Sequence
  synthesized
gccaggaguggggugugguc

SEQ ID NO: 1809 - RNA, 20 nt, Artificial Sequence
  synthesized
ggagugggguguagucaaga

SEQ ID NO: 1810 - RNA, 20 nt, Artificial Sequence
  synthesized
ggagugggguguggucaaga

SEQ ID NO: 1811 - RNA, 20 nt, Artificial Sequence
  synthesized
ggguguagucaagauuuggg

SEQ ID NO: 1812 - RNA, 20 nt, Artificial Sequence
  synthesized
ggguguggucaagauuuggg

SEQ ID NO: 1813 - RNA, 20 nt, Artificial Sequence
  synthesized
ggucaagauuugggggucca

SEQ ID NO: 1814 - RNA, 20 nt, Artificial Sequence
  synthesized
guagucaagauuuggggguc

SEQ ID NO: 1815 - RNA, 20 nt, Artificial Sequence
  synthesized
guggucaagauuuggggguc

SEQ ID NO: 1816 - RNA, 20 nt, Artificial Sequence
  synthesized
guguagucaagauuuggggg

SEQ ID NO: 1817 - RNA, 20 nt, Artificial Sequence
  synthesized
guguggucaagauuuggggg

SEQ ID NO: 1818 - RNA, 20 nt, Artificial Sequence
  synthesized
uggacccccaaaucuugacc

SEQ ID NO: 1819 - RNA, 20 nt, Artificial Sequence
  synthesized
uggacccccaaaucuugacu

SEQ ID NO: 1820 - RNA, 20 nt, Artificial Sequence
  synthesized
uugaccacaccccacuccug

SEQ ID NO: 1821 - RNA, 20 nt, Artificial Sequence
  synthesized
uugacuacaccccacuccug

SEQ ID NO: 1822 - RNA, 20 nt, Artificial Sequence
  synthesized
accaccgugcccgucccaaa

SEQ ID NO: 1823 - RNA, 20 nt, Artificial Sequence
  synthesized
accaccuugcccgucccaaa

SEQ ID NO: 1824 - RNA, 20 nt, Artificial Sequence
  synthesized
caccgugcccgucccaaaca

SEQ ID NO: 1825 - RNA, 20 nt, Artificial Sequence
  synthesized
caccuugcccgucccaaaca

SEQ ID NO: 1826 - RNA, 20 nt, Artificial Sequence
  synthesized
ccgugcccgucccaaacacu

SEQ ID NO: 1827 - RNA, 20 nt, Artificial Sequence
  synthesized
ccuugcccgucccaaacacu

SEQ ID NO: 1828 - RNA, 20 nt, Artificial Sequence
  synthesized
gaaccaccgugcccguccca

SEQ ID NO: 1829 - RNA, 20 nt, Artificial Sequence
  synthesized
gaaccaccuugcccguccca

SEQ ID NO: 1830 - RNA, 20 nt, Artificial Sequence
  synthesized
gcgugaaccaccgugcccgu

SEQ ID NO: 1831 - RNA, 20 nt, Artificial Sequence
  synthesized
gcgugaaccaccuugcccgu

SEQ ID NO: 1832 - RNA, 20 nt, Artificial Sequence
  synthesized
gugaaccaccgugcccgucc

SEQ ID NO: 1833 - RNA, 20 nt, Artificial Sequence
  synthesized
gugaaccaccuugcccgucc

SEQ ID NO: 1834 - RNA, 20 nt, Artificial Sequence
  synthesized
gugcccgucccaaacacucu

SEQ ID NO: 1835 - RNA, 20 nt, Artificial Sequence
  synthesized
ugggacgggcaaggugguuc

SEQ ID NO: 1836 - RNA, 20 nt, Artificial Sequence
  synthesized
ugggacgggcacggugguuc

SEQ ID NO: 1837 - RNA, 20 nt, Artificial Sequence
  synthesized
uguuugggacgggcaaggug

SEQ ID NO: 1838 - RNA, 20 nt, Artificial Sequence
  synthesized
uguuugggacgggcacggug

SEQ ID NO: 1839 - RNA, 20 nt, Artificial Sequence
  synthesized
uugcccgucccaaacacucu

SEQ ID NO: 1840 - RNA, 20 nt, Artificial Sequence
  synthesized
aacccuucccacucugcggc

SEQ ID NO: 1841 - RNA, 20 nt, Artificial Sequence
  synthesized
acaacccuucccacucugcg

SEQ ID NO: 1842 - RNA, 20 nt, Artificial Sequence
  synthesized
acagcccuucccacucugcg

SEQ ID NO: 1843 - RNA, 20 nt, Artificial Sequence
  synthesized
agcccuucccacucugcggc

SEQ ID NO: 1844 - RNA, 20 nt, Artificial Sequence
  synthesized
agggcugugguccacaggaa

SEQ ID NO: 1845 - RNA, 20 nt, Artificial Sequence
  synthesized
aggguugugguccacaggaa

SEQ ID NO: 1846 - RNA, 20 nt, Artificial Sequence
  synthesized
cagagugggaagggcugugg

SEQ ID NO: 1847 - RNA, 20 nt, Artificial Sequence
  synthesized
cagagugggaaggguugugg

SEQ ID NO: 1848 - RNA, 20 nt, Artificial Sequence
  synthesized
ccuguggaccacaacccuuc

SEQ ID NO: 1849 - RNA, 20 nt, Artificial Sequence
  synthesized
ccuguggaccacagcccuuc

SEQ ID NO: 1850 - RNA, 20 nt, Artificial Sequence
  synthesized
cgcagagugggaagggcugu

SEQ ID NO: 1851 - RNA, 20 nt, Artificial Sequence
  synthesized
cgcagagugggaaggguugu

SEQ ID NO: 1852 - RNA, 20 nt, Artificial Sequence
  synthesized
cugugguccacaggaaacaa

SEQ ID NO: 1853 - RNA, 20 nt, Artificial Sequence
  synthesized
gaagggcugugguccacagg

SEQ ID NO: 1854 - RNA, 20 nt, Artificial Sequence
  synthesized
gaaggguugugguccacagg

SEQ ID NO: 1855 - RNA, 20 nt, Artificial Sequence
  synthesized
gagugggaagggcugugguc

SEQ ID NO: 1856 - RNA, 20 nt, Artificial Sequence
  synthesized
gagugggaaggguugugguc

SEQ ID NO: 1857 - RNA, 20 nt, Artificial Sequence
  synthesized
gccgcagagugggaagggcu

SEQ ID NO: 1858 - RNA, 20 nt, Artificial Sequence
  synthesized
gccgcagagugggaaggguu

SEQ ID NO: 1859 - RNA, 20 nt, Artificial Sequence
  synthesized
ggcugugguccacaggaaac

SEQ ID NO: 1860 - RNA, 20 nt, Artificial Sequence
  synthesized
gguugugguccacaggaaac

SEQ ID NO: 1861 - RNA, 20 nt, Artificial Sequence
  synthesized
gugggaagggcuguggucca

SEQ ID NO: 1862 - RNA, 20 nt, Artificial Sequence
  synthesized
gugggaaggguuguggucca

SEQ ID NO: 1863 - RNA, 20 nt, Artificial Sequence
  synthesized
guuuccuguggaccacaacc

SEQ ID NO: 1864 - RNA, 20 nt, Artificial Sequence
  synthesized
guuuccuguggaccacagcc

SEQ ID NO: 1865 - RNA, 20 nt, Artificial Sequence
  synthesized
uggaccacaacccuucccac

SEQ ID NO: 1866 - RNA, 20 nt, Artificial Sequence
  synthesized
uggaccacagcccuucccac

SEQ ID NO: 1867 - RNA, 20 nt, Artificial Sequence
  synthesized
uguggaccacaacccuuccc

SEQ ID NO: 1868 - RNA, 20 nt, Artificial Sequence
  synthesized
uguggaccacagcccuuccc

SEQ ID NO: 1869 - RNA, 20 nt, Artificial Sequence
  synthesized
uuccuguggaccacaacccu

SEQ ID NO: 1870 - RNA, 20 nt, Artificial Sequence
  synthesized
uuccuguggaccacagcccu

SEQ ID NO: 1871 - RNA, 20 nt, Artificial Sequence
  synthesized
uugugguccacaggaaacaa

SEQ ID NO: 1872 - RNA, 20 nt, Artificial Sequence
  synthesized
uuguuuccuguggaccacaa

SEQ ID NO: 1873 - RNA, 20 nt, Artificial Sequence
  synthesized
uuguuuccuguggaccacag

SEQ ID NO: 1874 - RNA, 20 nt, Artificial Sequence
  synthesized
caccugggaggaggaggagg

SEQ ID NO: 1875 - RNA, 20 nt, Artificial Sequence
  synthesized
ccugggaggaggaggaggau

SEQ ID NO: 1876 - RNA, 20 nt, Artificial Sequence
  synthesized
accaaugcaugcugaaaaag

SEQ ID NO: 1877 - RNA, 20 nt, Artificial Sequence
  synthesized
acuaaugcaugcugaaaaag

SEQ ID NO: 1878 - RNA, 20 nt, Artificial Sequence
  synthesized
augcauuagugcccaaguaa

SEQ ID NO: 1879 - RNA, 20 nt, Artificial Sequence
  synthesized
augcauuggugcccaaguaa

SEQ ID NO: 1880 - RNA, 20 nt, Artificial Sequence
  synthesized
auuagugcccaaguaaaaac

SEQ ID NO: 1881 - RNA, 20 nt, Artificial Sequence
  synthesized
auuggugcccaaguaaaaac

SEQ ID NO: 1882 - RNA, 20 nt, Artificial Sequence
  synthesized
caaugcaugcugaaaaagag

SEQ ID NO: 1883 - RNA, 20 nt, Artificial Sequence
  synthesized
cagcaugcauuagugcccaa

SEQ ID NO: 1884 - RNA, 20 nt, Artificial Sequence
  synthesized
cagcaugcauuggugcccaa

SEQ ID NO: 1885 - RNA, 20 nt, Artificial Sequence
  synthesized
cucuuuuucagcaugcauua

SEQ ID NO: 1886 - RNA, 20 nt, Artificial Sequence
  synthesized
cucuuuuucagcaugcauug

SEQ ID NO: 1887 - RNA, 20 nt, Artificial Sequence
  synthesized
cuuuuucagcaugcauuagu

SEQ ID NO: 1888 - RNA, 20 nt, Artificial Sequence
  synthesized
cuuuuucagcaugcauuggu

SEQ ID NO: 1889 - RNA, 20 nt, Artificial Sequence
  synthesized
gcauuagugcccaaguaaaa

SEQ ID NO: 1890 - RNA, 20 nt, Artificial Sequence
  synthesized
gcauuggugcccaaguaaaa

SEQ ID NO: 1891 - RNA, 20 nt, Artificial Sequence
  synthesized
gggcaccaaugcaugcugaa

SEQ ID NO: 1892 - RNA, 20 nt, Artificial Sequence
  synthesized
gggcacuaaugcaugcugaa

SEQ ID NO: 1893 - RNA, 20 nt, Artificial Sequence
  synthesized
guuuuuacuugggcaccaau

SEQ ID NO: 1894 - RNA, 20 nt, Artificial Sequence
  synthesized
guuuuuacuugggcacuaau

SEQ ID NO: 1895 - RNA, 20 nt, Artificial Sequence
  synthesized
uaaugcaugcugaaaaagag

SEQ ID NO: 1896 - RNA, 20 nt, Artificial Sequence
  synthesized
uagugcccaaguaaaaacca

SEQ ID NO: 1897 - RNA, 20 nt, Artificial Sequence
  synthesized
uggugcccaaguaaaaacca

SEQ ID NO: 1898 - RNA, 20 nt, Artificial Sequence
  synthesized
ugguuuuuacuugggcacca

SEQ ID NO: 1899 - RNA, 20 nt, Artificial Sequence
  synthesized
ugguuuuuacuugggcacua

SEQ ID NO: 1900 - RNA, 20 nt, Artificial Sequence
  synthesized
uuacuugggcaccaaugcau

SEQ ID NO: 1901 - RNA, 20 nt, Artificial Sequence
  synthesized
uuacuugggcacuaaugcau

SEQ ID NO: 1902 - RNA, 20 nt, Artificial Sequence
  synthesized
uucagcaugcauuagugccc

SEQ ID NO: 1903 - RNA, 20 nt, Artificial Sequence
  synthesized
uucagcaugcauuggugccc

SEQ ID NO: 1904 - RNA, 20 nt, Artificial Sequence
  synthesized
uugggcaccaaugcaugcug

SEQ ID NO: 1905 - RNA, 20 nt, Artificial Sequence
  synthesized
uugggcacuaaugcaugcug

SEQ ID NO: 1906 - RNA, 20 nt, Artificial Sequence
  synthesized
uuuuacuugggcaccaaugc

SEQ ID NO: 1907 - RNA, 20 nt, Artificial Sequence
  synthesized
uuuuacuugggcacuaaugc

SEQ ID NO: 1908 - RNA, 20 nt, Artificial Sequence
  synthesized
accucuuauccagguaccag

SEQ ID NO: 1909 - RNA, 20 nt, Artificial Sequence
  synthesized
accucuucuccagguaccag

SEQ ID NO: 1910 - RNA, 20 nt, Artificial Sequence
  synthesized
ccccaccucuuauccaggua

SEQ ID NO: 1911 - RNA, 20 nt, Artificial Sequence
  synthesized
ccccaccucuucuccaggua

SEQ ID NO: 1912 - RNA, 20 nt, Artificial Sequence
  synthesized
cccugguaccuggagaagag

SEQ ID NO: 1913 - RNA, 20 nt, Artificial Sequence
  synthesized
cccugguaccuggauaagag

SEQ ID NO: 1914 - RNA, 20 nt, Artificial Sequence
  synthesized
ccuggagaagaggugggggc

SEQ ID NO: 1915 - RNA, 20 nt, Artificial Sequence
  synthesized
ccuggauaagaggugggggc

SEQ ID NO: 1916 - RNA, 20 nt, Artificial Sequence
  synthesized
gagaagaggugggggcgagc

SEQ ID NO: 1917 - RNA, 20 nt, Artificial Sequence
  synthesized
gauaagaggugggggcgagc

SEQ ID NO: 1918 - RNA, 20 nt, Artificial Sequence
  synthesized
gcccccaccucuuauccagg

SEQ ID NO: 1919 - RNA, 20 nt, Artificial Sequence
  synthesized
gcccccaccucuucuccagg

SEQ ID NO: 1920 - RNA, 20 nt, Artificial Sequence
  synthesized
gcucgcccccaccucuuauc

SEQ ID NO: 1921 - RNA, 20 nt, Artificial Sequence
  synthesized
gcucgcccccaccucuucuc

SEQ ID NO: 1922 - RNA, 20 nt, Artificial Sequence
  synthesized
gggcucgcccccaccucuua

SEQ ID NO: 1923 - RNA, 20 nt, Artificial Sequence
  synthesized
gggcucgcccccaccucuuc

SEQ ID NO: 1924 - RNA, 20 nt, Artificial Sequence
  synthesized
uauccagguaccagggccug

SEQ ID NO: 1925 - RNA, 20 nt, Artificial Sequence
  synthesized
ucgcccccaccucuuaucca

SEQ ID NO: 1926 - RNA, 20 nt, Artificial Sequence
  synthesized
ucgcccccaccucuucucca

SEQ ID NO: 1927 - RNA, 20 nt, Artificial Sequence
  synthesized
ucuccagguaccagggccug

SEQ ID NO: 1928 - RNA, 20 nt, Artificial Sequence
  synthesized
uggagaagaggugggggcga

SEQ ID NO: 1929 - RNA, 20 nt, Artificial Sequence
  synthesized
uggauaagaggugggggcga

SEQ ID NO: 1930 - RNA, 20 nt, Artificial Sequence
  synthesized
caccaagcccagcuaauuuu

SEQ ID NO: 1931 - RNA, 20 nt, Artificial Sequence
  synthesized
acacgccuaucuacaucuuc

SEQ ID NO: 1932 - RNA, 20 nt, Artificial Sequence
  synthesized
acacgccuaucuacgucuuc

SEQ ID NO: 1933 - RNA, 20 nt, Artificial Sequence
  synthesized
acgccuaucuacaucuuccc

SEQ ID NO: 1934 - RNA, 20 nt, Artificial Sequence
  synthesized
acgccuaucuacgucuuccc

SEQ ID NO: 1935 - RNA, 20 nt, Artificial Sequence
  synthesized
acguagauaggcgugugcau

SEQ ID NO: 1936 - RNA, 20 nt, Artificial Sequence
  synthesized
agacguagauaggcgugugc

SEQ ID NO: 1937 - RNA, 20 nt, Artificial Sequence
  synthesized
agauguagauaggcgugugc

SEQ ID NO: 1938 - RNA, 20 nt, Artificial Sequence
  synthesized
aucuacaucuucccugccaa

SEQ ID NO: 1939 - RNA, 20 nt, Artificial Sequence
  synthesized
aucuacgucuucccugccaa

SEQ ID NO: 1940 - RNA, 20 nt, Artificial Sequence
  synthesized
augcacacgccuaucuacau

SEQ ID NO: 1941 - RNA, 20 nt, Artificial Sequence
  synthesized
augcacacgccuaucuacgu

SEQ ID NO: 1942 - RNA, 20 nt, Artificial Sequence
  synthesized
auguagauaggcgugugcau

SEQ ID NO: 1943 - RNA, 20 nt, Artificial Sequence
  synthesized
cagggaagacguagauaggc

SEQ ID NO: 1944 - RNA, 20 nt, Artificial Sequence
  synthesized
cagggaagauguagauaggc

SEQ ID NO: 1945 - RNA, 20 nt, Artificial Sequence
  synthesized
cuacaucuucccugccaaag

SEQ ID NO: 1946 - RNA, 20 nt, Artificial Sequence
  synthesized
cuacgucuucccugccaaag

SEQ ID NO: 1947 - RNA, 20 nt, Artificial Sequence
  synthesized
cuaucuacaucuucccugcc

SEQ ID NO: 1948 - RNA, 20 nt, Artificial Sequence
  synthesized
cuaucuacgucuucccugcc

SEQ ID NO: 1949 - RNA, 20 nt, Artificial Sequence
  synthesized
cuuuggcagggaagacguag

SEQ ID NO: 1950 - RNA, 20 nt, Artificial Sequence
  synthesized
cuuuggcagggaagauguag

SEQ ID NO: 1951 - RNA, 20 nt, Artificial Sequence
  synthesized
gaagacguagauaggcgugu

SEQ ID NO: 1952 - RNA, 20 nt, Artificial Sequence
  synthesized
gaagauguagauaggcgugu

SEQ ID NO: 1953 - RNA, 20 nt, Artificial Sequence
  synthesized
gcacacgccuaucuacaucu

SEQ ID NO: 1954 - RNA, 20 nt, Artificial Sequence
  synthesized
gcacacgccuaucuacgucu

SEQ ID NO: 1955 - RNA, 20 nt, Artificial Sequence
  synthesized
gccuaucuacaucuucccug

SEQ ID NO: 1956 - RNA, 20 nt, Artificial Sequence
  synthesized
gccuaucuacgucuucccug

SEQ ID NO: 1957 - RNA, 20 nt, Artificial Sequence
  synthesized
ggcagggaagacguagauag

SEQ ID NO: 1958 - RNA, 20 nt, Artificial Sequence
  synthesized
ggcagggaagauguagauag

SEQ ID NO: 1959 - RNA, 20 nt, Artificial Sequence
  synthesized
gggaagacguagauaggcgu

SEQ ID NO: 1960 - RNA, 20 nt, Artificial Sequence
  synthesized
gggaagauguagauaggcgu

SEQ ID NO: 1961 - RNA, 20 nt, Artificial Sequence
  synthesized
aaccauuugauucaggcugu

SEQ ID NO: 1962 - RNA, 20 nt, Artificial Sequence
  synthesized
acagccugaaucaaauggcu

SEQ ID NO: 1963 - RNA, 20 nt, Artificial Sequence
  synthesized
acagccugaaucaaaugguu

SEQ ID NO: 1964 - RNA, 20 nt, Artificial Sequence
  synthesized
agccauuugauucaggcugu

SEQ ID NO: 1965 - RNA, 20 nt, Artificial Sequence
  synthesized
agcuaaccauuugauucagg

SEQ ID NO: 1966 - RNA, 20 nt, Artificial Sequence
  synthesized
agcuagccauuugauucagg

SEQ ID NO: 1967 - RNA, 20 nt, Artificial Sequence
  synthesized
aucuauuaagcuagccauuu

SEQ ID NO: 1968 - RNA, 20 nt, Artificial Sequence
  synthesized
auggcuagcuuaauagauaa

SEQ ID NO: 1969 - RNA, 20 nt, Artificial Sequence
  synthesized
auuaagcuagccauuugauu

SEQ ID NO: 1970 - RNA, 20 nt, Artificial Sequence
  synthesized
ccugaaucaaauggcuagcu

SEQ ID NO: 1971 - RNA, 20 nt, Artificial Sequence
  synthesized
ccugaaucaaaugguuagcu

SEQ ID NO: 1972 - RNA, 20 nt, Artificial Sequence
  synthesized
cuaaccauuugauucaggcu

SEQ ID NO: 1973 - RNA, 20 nt, Artificial Sequence
  synthesized
cuagccauuugauucaggcu

SEQ ID NO: 1974 - RNA, 20 nt, Artificial Sequence
  synthesized
cuauuaagcuaaccauuuga

SEQ ID NO: 1975 - RNA, 20 nt, Artificial Sequence
  synthesized
cuauuaagcuagccauuuga

SEQ ID NO: 1976 - RNA, 20 nt, Artificial Sequence
  synthesized
ggcuagcuuaauagauaaaa

SEQ ID NO: 1977 - RNA, 20 nt, Artificial Sequence
  synthesized
uaagcuaaccauuugauuca

SEQ ID NO: 1978 - RNA, 20 nt, Artificial Sequence
  synthesized
uaagcuagccauuugauuca

SEQ ID NO: 1979 - RNA, 20 nt, Artificial Sequence
  synthesized
ucaaauggcuagcuuaauag

SEQ ID NO: 1980 - RNA, 20 nt, Artificial Sequence
  synthesized
ucaaaugguuagcuuaauag

SEQ ID NO: 1981 - RNA, 20 nt, Artificial Sequence
  synthesized
uuaucuauuaagcuagccau

SEQ ID NO: 1982 - RNA, 20 nt, Artificial Sequence
  synthesized
aaaucuggaagauagccugg

SEQ ID NO: 1983 - RNA, 20 nt, Artificial Sequence
  synthesized
aacaacggcacuuaagaaau

SEQ ID NO: 1984 - RNA, 20 nt, Artificial Sequence
  synthesized
aacaacggcacuuaaggaau

SEQ ID NO: 1985 - RNA, 20 nt, Artificial Sequence
  synthesized
acggcacuuaagaaaucugg

SEQ ID NO: 1986 - RNA, 20 nt, Artificial Sequence
  synthesized
acggcacuuaaggaaucugg

SEQ ID NO: 1987 - RNA, 20 nt, Artificial Sequence
  synthesized
agauuccuuaagugccguug

SEQ ID NO: 1988 - RNA, 20 nt, Artificial Sequence
  synthesized
agauuucuuaagugccguug

SEQ ID NO: 1989 - RNA, 20 nt, Artificial Sequence
  synthesized
aggcuaucuuccagauuccu

SEQ ID NO: 1990 - RNA, 20 nt, Artificial Sequence
  synthesized
aggcuaucuuccagauuucu

SEQ ID NO: 1991 - RNA, 20 nt, Artificial Sequence
  synthesized
auuccuuaagugccguuguu

SEQ ID NO: 1992 - RNA, 20 nt, Artificial Sequence
  synthesized
auuucuuaagugccguuguu

SEQ ID NO: 1993 - RNA, 20 nt, Artificial Sequence
  synthesized
cacuuaagaaaucuggaaga

SEQ ID NO: 1994 - RNA, 20 nt, Artificial Sequence
  synthesized
cacuuaaggaaucuggaaga

SEQ ID NO: 1995 - RNA, 20 nt, Artificial Sequence
  synthesized
ccagauuccuuaagugccgu

SEQ ID NO: 1996 - RNA, 20 nt, Artificial Sequence
  synthesized
ccagauuucuuaagugccgu

SEQ ID NO: 1997 - RNA, 20 nt, Artificial Sequence
  synthesized
ccaggcuaucuuccagauuc

SEQ ID NO: 1998 - RNA, 20 nt, Artificial Sequence
  synthesized
ccaggcuaucuuccagauuu

SEQ ID NO: 1999 - RNA, 20 nt, Artificial Sequence
  synthesized
cuuaagaaaucuggaagaua

SEQ ID NO: 2000 - RNA, 20 nt, Artificial Sequence
  synthesized
cuuaaggaaucuggaagaua

SEQ ID NO: 2001 - RNA, 20 nt, Artificial Sequence
  synthesized
gaaucuggaagauagccugg

SEQ ID NO: 2002 - RNA, 20 nt, Artificial Sequence
  synthesized
uaucuuccagauuccuuaag

SEQ ID NO: 2003 - RNA, 20 nt, Artificial Sequence
  synthesized
uaucuuccagauuucuuaag

SEQ ID NO: 2004 - RNA, 20 nt, Artificial Sequence
  synthesized
uccuuaagugccguuguuca

SEQ ID NO: 2005 - RNA, 20 nt, Artificial Sequence
  synthesized
ucuuccagauuccuuaagug

SEQ ID NO: 2006 - RNA, 20 nt, Artificial Sequence
  synthesized
ucuuccagauuucuuaagug

SEQ ID NO: 2007 - RNA, 20 nt, Artificial Sequence
  synthesized
ugaacaacggcacuuaagaa

SEQ ID NO: 2008 - RNA, 20 nt, Artificial Sequence
  synthesized
ugaacaacggcacuuaagga

SEQ ID NO: 2009 - RNA, 20 nt, Artificial Sequence
  synthesized
uuccagauuccuuaagugcc

SEQ ID NO: 2010 - RNA, 20 nt, Artificial Sequence
  synthesized
uuccagauuucuuaagugcc

SEQ ID NO: 2011 - RNA, 20 nt, Artificial Sequence
  synthesized
uucuuaagugccguuguuca

SEQ ID NO: 2012 - RNA, 20 nt, Artificial Sequence
  synthesized
agcucaggcagcccugaucc

SEQ ID NO: 2013 - RNA, 20 nt, Artificial Sequence
  synthesized
agcucaggcagccgugaucc

SEQ ID NO: 2014 - RNA, 20 nt, Artificial Sequence
  synthesized
agggaucacggcugccugag

SEQ ID NO: 2015 - RNA, 20 nt, Artificial Sequence
  synthesized
agggaucagggcugccugag

SEQ ID NO: 2016 - RNA, 20 nt, Artificial Sequence
  synthesized
cacggcugccugagcucagg

SEQ ID NO: 2017 - RNA, 20 nt, Artificial Sequence
  synthesized
cagggaucagggcugccuga

SEQ ID NO: 2018 - RNA, 20 nt, Artificial Sequence
  synthesized
cagggcugccugagcucagg

SEQ ID NO: 2019 - RNA, 20 nt, Artificial Sequence
  synthesized
cccugagcucaggcagcccu

SEQ ID NO: 2020 - RNA, 20 nt, Artificial Sequence
  synthesized
cccugaucccugaaggacgg

SEQ ID NO: 2021 - RNA, 20 nt, Artificial Sequence
  synthesized
ccguccuucagggaucaggg

SEQ ID NO: 2022 - RNA, 20 nt, Artificial Sequence
  synthesized
ccugagcucaggcagcccug

SEQ ID NO: 2023 - RNA, 20 nt, Artificial Sequence
  synthesized
ccugagcucaggcagccgug

SEQ ID NO: 2024 - RNA, 20 nt, Artificial Sequence
  synthesized
ccugaucccugaaggacgga

SEQ ID NO: 2025 - RNA, 20 nt, Artificial Sequence
  synthesized
ccuucagggaucagggcugc

SEQ ID NO: 2026 - RNA, 20 nt, Artificial Sequence
  synthesized
cguccuucagggaucacggc

SEQ ID NO: 2027 - RNA, 20 nt, Artificial Sequence
  synthesized
cguccuucagggaucagggc

SEQ ID NO: 2028 - RNA, 20 nt, Artificial Sequence
  synthesized
cgugaucccugaaggacgga

SEQ ID NO: 2029 - RNA, 20 nt, Artificial Sequence
  synthesized
cucaggcagcccugaucccu

SEQ ID NO: 2030 - RNA, 20 nt, Artificial Sequence
  synthesized
cucaggcagccgugaucccu

SEQ ID NO: 2031 - RNA, 20 nt, Artificial Sequence
  synthesized
cuccguccuucagggaucag

SEQ ID NO: 2032 - RNA, 20 nt, Artificial Sequence
  synthesized
cugagcucaggcagcccuga

SEQ ID NO: 2033 - RNA, 20 nt, Artificial Sequence
  synthesized
cugaucccugaaggacggag

SEQ ID NO: 2034 - RNA, 20 nt, Artificial Sequence
  synthesized
gagcucaggcagcccugauc

SEQ ID NO: 2035 - RNA, 20 nt, Artificial Sequence
  synthesized
gcagcccugaucccugaagg

SEQ ID NO: 2036 - RNA, 20 nt, Artificial Sequence
  synthesized
gcccugaucccugaaggacg

SEQ ID NO: 2037 - RNA, 20 nt, Artificial Sequence
  synthesized
gccgugaucccugaaggacg

SEQ ID NO: 2038 - RNA, 20 nt, Artificial Sequence
  synthesized
ggaucacggcugccugagcu

SEQ ID NO: 2039 - RNA, 20 nt, Artificial Sequence
  synthesized
ggaucagggcugccugagcu

SEQ ID NO: 2040 - RNA, 20 nt, Artificial Sequence
  synthesized
ggcagcccugaucccugaag

SEQ ID NO: 2041 - RNA, 20 nt, Artificial Sequence
  synthesized
ggcagccgugaucccugaag

SEQ ID NO: 2042 - RNA, 20 nt, Artificial Sequence
  synthesized
gggaucagggcugccugagc

SEQ ID NO: 2043 - RNA, 20 nt, Artificial Sequence
  synthesized
guccuucagggaucagggcu

SEQ ID NO: 2044 - RNA, 20 nt, Artificial Sequence
  synthesized
ucaggcagcccugaucccug

SEQ ID NO: 2045 - RNA, 20 nt, Artificial Sequence
  synthesized
ucagggaucacggcugccug

SEQ ID NO: 2046 - RNA, 20 nt, Artificial Sequence
  synthesized
ucagggaucagggcugccug

SEQ ID NO: 2047 - RNA, 20 nt, Artificial Sequence
  synthesized
uccguccuucagggaucacg

SEQ ID NO: 2048 - RNA, 20 nt, Artificial Sequence
  synthesized
uccguccuucagggaucagg

SEQ ID NO: 2049 - RNA, 20 nt, Artificial Sequence
  synthesized
uccuucagggaucacggcug

SEQ ID NO: 2050 - RNA, 20 nt, Artificial Sequence
  synthesized
uccuucagggaucagggcug

SEQ ID NO: 2051 - RNA, 20 nt, Artificial Sequence
  synthesized
ugagcucaggcagcccugau

SEQ ID NO: 2052 - RNA, 20 nt, Artificial Sequence
  synthesized
ugagcucaggcagccgugau

SEQ ID NO: 2053 - RNA, 20 nt, Artificial Sequence
  synthesized
uucagggaucagggcugccu

SEQ ID NO: 2054 - RNA, 20 nt, Artificial Sequence
  synthesized
agccccggcaggcuucuccu

SEQ ID NO: 2055 - RNA, 20 nt, Artificial Sequence
  synthesized
agccccggcaggcuucucuu

SEQ ID NO: 2056 - RNA, 20 nt, Artificial Sequence
  synthesized
cagagagauggaaagagaag

SEQ ID NO: 2057 - RNA, 20 nt, Artificial Sequence
  synthesized
cagagagauggaaggagaag

SEQ ID NO: 2058 - RNA, 20 nt, Artificial Sequence
  synthesized
caggcuucuccuuccaucuc

SEQ ID NO: 2059 - RNA, 20 nt, Artificial Sequence
  synthesized
caggcuucucuuuccaucuc

SEQ ID NO: 2060 - RNA, 20 nt, Artificial Sequence
  synthesized
ccccggcaggcuucuccuuc

SEQ ID NO: 2061 - RNA, 20 nt, Artificial Sequence
  synthesized
ccccggcaggcuucucuuuc

SEQ ID NO: 2062 - RNA, 20 nt, Artificial Sequence
  synthesized
ccggcaggcuucuccuucca

SEQ ID NO: 2063 - RNA, 20 nt, Artificial Sequence
  synthesized
ccggcaggcuucucuuucca

SEQ ID NO: 2064 - RNA, 20 nt, Artificial Sequence
  synthesized
cuuccaucucucugaagcaa

SEQ ID NO: 2065 - RNA, 20 nt, Artificial Sequence
  synthesized
cuucuccuuccaucucucug

SEQ ID NO: 2066 - RNA, 20 nt, Artificial Sequence
  synthesized
cuucucuuuccaucucucug

SEQ ID NO: 2067 - RNA, 20 nt, Artificial Sequence
  synthesized
gaaagagaagccugccgggg

SEQ ID NO: 2068 - RNA, 20 nt, Artificial Sequence
  synthesized
gaaggagaagccugccgggg

SEQ ID NO: 2069 - RNA, 20 nt, Artificial Sequence
  synthesized
gagagauggaaagagaagcc

SEQ ID NO: 2070 - RNA, 20 nt, Artificial Sequence
  synthesized
gagagauggaaggagaagcc

SEQ ID NO: 2071 - RNA, 20 nt, Artificial Sequence
  synthesized
gagauggaaagagaagccug

SEQ ID NO: 2072 - RNA, 20 nt, Artificial Sequence
  synthesized
gagauggaaggagaagccug

SEQ ID NO: 2073 - RNA, 20 nt, Artificial Sequence
  synthesized
gcuucagagagauggaaaga

SEQ ID NO: 2074 - RNA, 20 nt, Artificial Sequence
  synthesized
gcuucagagagauggaagga

SEQ ID NO: 2075 - RNA, 20 nt, Artificial Sequence
  synthesized
ggcaggcuucuccuuccauc

SEQ ID NO: 2076 - RNA, 20 nt, Artificial Sequence
  synthesized
ggcaggcuucucuuuccauc

SEQ ID NO: 2077 - RNA, 20 nt, Artificial Sequence
  synthesized
uccuuccaucucucugaagc

SEQ ID NO: 2078 - RNA, 20 nt, Artificial Sequence
  synthesized
ucuccuuccaucucucugaa

SEQ ID NO: 2079 - RNA, 20 nt, Artificial Sequence
  synthesized
ucucuuuccaucucucugaa

SEQ ID NO: 2080 - RNA, 20 nt, Artificial Sequence
  synthesized
ucuuuccaucucucugaagc

SEQ ID NO: 2081 - RNA, 20 nt, Artificial Sequence
  synthesized
uggaaagagaagccugccgg

SEQ ID NO: 2082 - RNA, 20 nt, Artificial Sequence
  synthesized
uggaaggagaagccugccgg

SEQ ID NO: 2083 - RNA, 20 nt, Artificial Sequence
  synthesized
uucagagagauggaaagaga

SEQ ID NO: 2084 - RNA, 20 nt, Artificial Sequence
  synthesized
uucagagagauggaaggaga

SEQ ID NO: 2085 - RNA, 20 nt, Artificial Sequence
  synthesized
uugcuucagagagauggaaa

SEQ ID NO: 2086 - RNA, 20 nt, Artificial Sequence
  synthesized
uugcuucagagagauggaag

SEQ ID NO: 2087 - RNA, 20 nt, Artificial Sequence
  synthesized
uuuccaucucucugaagcaa

SEQ ID NO: 2088 - RNA, 20 nt, Artificial Sequence
  synthesized
auggugugugggaguggggg

SEQ ID NO: 2089 - RNA, 20 nt, Artificial Sequence
  synthesized
augguguguggggguggggg

SEQ ID NO: 2090 - RNA, 20 nt, Artificial Sequence
  synthesized
cacccccacacaccauuuuu

SEQ ID NO: 2091 - RNA, 20 nt, Artificial Sequence
  synthesized
cacucccacacaccauuuuu

SEQ ID NO: 2092 - RNA, 20 nt, Artificial Sequence
  synthesized
cccacccccacacaccauuu

SEQ ID NO: 2093 - RNA, 20 nt, Artificial Sequence
  synthesized
cccacucccacacaccauuu

SEQ ID NO: 2094 - RNA, 20 nt, Artificial Sequence
  synthesized
cccccacacaccauuuuugc

SEQ ID NO: 2095 - RNA, 20 nt, Artificial Sequence
  synthesized
cccccacccccacacaccau

SEQ ID NO: 2096 - RNA, 20 nt, Artificial Sequence
  synthesized
cccccacucccacacaccau

SEQ ID NO: 2097 - RNA, 20 nt, Artificial Sequence
  synthesized
ccccuugucccccaccccca

SEQ ID NO: 2098 - RNA, 20 nt, Artificial Sequence
  synthesized
ccccuugucccccacuccca

SEQ ID NO: 2099 - RNA, 20 nt, Artificial Sequence
  synthesized
cccuccccuugucccccacu

SEQ ID NO: 2100 - RNA, 20 nt, Artificial Sequence
  synthesized
ccuugucccccacccccaca

SEQ ID NO: 2101 - RNA, 20 nt, Artificial Sequence
  synthesized
ccuugucccccacucccaca

SEQ ID NO: 2102 - RNA, 20 nt, Artificial Sequence
  synthesized
cucccacacaccauuuuugc

SEQ ID NO: 2103 - RNA, 20 nt, Artificial Sequence
  synthesized
cuccccuugucccccacccc

SEQ ID NO: 2104 - RNA, 20 nt, Artificial Sequence
  synthesized
cuccccuugucccccacucc

SEQ ID NO: 2105 - RNA, 20 nt, Artificial Sequence
  synthesized
ggugugugggagugggggac

SEQ ID NO: 2106 - RNA, 20 nt, Artificial Sequence
  synthesized
ggugugugggggugggggac

SEQ ID NO: 2107 - RNA, 20 nt, Artificial Sequence
  synthesized
gucccccacccccacacacc

SEQ ID NO: 2108 - RNA, 20 nt, Artificial Sequence
  synthesized
gucccccacucccacacacc

SEQ ID NO: 2109 - RNA, 20 nt, Artificial Sequence
  synthesized
uugucccccacccccacaca

SEQ ID NO: 2110 - RNA, 20 nt, Artificial Sequence
  synthesized
uugucccccacucccacaca

SEQ ID NO: 2111 - RNA, 20 nt, Artificial Sequence
  synthesized
aacugacucucuauugcgac

SEQ ID NO: 2112 - RNA, 20 nt, Artificial Sequence
  synthesized
aacugacucuguauugcgac

SEQ ID NO: 2113 - RNA, 20 nt, Artificial Sequence
  synthesized
acagagucaguuucucaaac

SEQ ID NO: 2114 - RNA, 20 nt, Artificial Sequence
  synthesized
agagagucaguuucucaaac

SEQ ID NO: 2115 - RNA, 20 nt, Artificial Sequence
  synthesized
agcugucgcaauacagaguc

SEQ ID NO: 2116 - RNA, 20 nt, Artificial Sequence
  synthesized
agcugucgcaauagagaguc

SEQ ID NO: 2117 - RNA, 20 nt, Artificial Sequence
  synthesized
auacagagucaguuucucaa

SEQ ID NO: 2118 - RNA, 20 nt, Artificial Sequence
  synthesized
auagagagucaguuucucaa

SEQ ID NO: 2119 - RNA, 20 nt, Artificial Sequence
  synthesized
auguagcugucgcaauacag

SEQ ID NO: 2120 - RNA, 20 nt, Artificial Sequence
  synthesized
auguagcugucgcaauagag

SEQ ID NO: 2121 - RNA, 20 nt, Artificial Sequence
  synthesized
cuauugcgacagcuacaucc

SEQ ID NO: 2122 - RNA, 20 nt, Artificial Sequence
  synthesized
cucuauugcgacagcuacau

SEQ ID NO: 2123 - RNA, 20 nt, Artificial Sequence
  synthesized
cucucuauugcgacagcuac

SEQ ID NO: 2124 - RNA, 20 nt, Artificial Sequence
  synthesized
cugucgcaauacagagucag

SEQ ID NO: 2125 - RNA, 20 nt, Artificial Sequence
  synthesized
cugucgcaauagagagucag

SEQ ID NO: 2126 - RNA, 20 nt, Artificial Sequence
  synthesized
gaaacugacucucuauugcg

SEQ ID NO: 2127 - RNA, 20 nt, Artificial Sequence
  synthesized
gaaacugacucuguauugcg

SEQ ID NO: 2128 - RNA, 20 nt, Artificial Sequence
  synthesized
gacucucuauugcgacagcu

SEQ ID NO: 2129 - RNA, 20 nt, Artificial Sequence
  synthesized
gacucuguauugcgacagcu

SEQ ID NO: 2130 - RNA, 20 nt, Artificial Sequence
  synthesized
guagcugucgcaauacagag

SEQ ID NO: 2131 - RNA, 20 nt, Artificial Sequence
  synthesized
guagcugucgcaauagagag

SEQ ID NO: 2132 - RNA, 20 nt, Artificial Sequence
  synthesized
gucgcaauacagagucaguu

SEQ ID NO: 2133 - RNA, 20 nt, Artificial Sequence
  synthesized
gucgcaauagagagucaguu

SEQ ID NO: 2134 - RNA, 20 nt, Artificial Sequence
  synthesized
guuugagaaacugacucucu

SEQ ID NO: 2135 - RNA, 20 nt, Artificial Sequence
  synthesized
guuugagaaacugacucugu

SEQ ID NO: 2136 - RNA, 20 nt, Artificial Sequence
  synthesized
aaggaagcagcuggggaggg

SEQ ID NO: 2137 - RNA, 20 nt, Artificial Sequence
  synthesized
agcuggggagggaagggcuc

SEQ ID NO: 2138 - RNA, 20 nt, Artificial Sequence
  synthesized
agggaagggcucaccuagag

SEQ ID NO: 2139 - RNA, 20 nt, Artificial Sequence
  synthesized
aggugagcccuucccucccc

SEQ ID NO: 2140 - RNA, 20 nt, Artificial Sequence
  synthesized
cccuccccagcugcuuccuu

SEQ ID NO: 2141 - RNA, 20 nt, Artificial Sequence
  synthesized
ccuucccuccccagcugcuu

SEQ ID NO: 2142 - RNA, 20 nt, Artificial Sequence
  synthesized
cuaggugagcccuucccucc

SEQ ID NO: 2143 - RNA, 20 nt, Artificial Sequence
  synthesized
cuccccagcugcuuccuugg

SEQ ID NO: 2144 - RNA, 20 nt, Artificial Sequence
  synthesized
cucuaggugagcccuucccu

SEQ ID NO: 2145 - RNA, 20 nt, Artificial Sequence
  synthesized
cuggggagggaagggcucac

SEQ ID NO: 2146 - RNA, 20 nt, Artificial Sequence
  synthesized
gagcccuucccuccccagcu

SEQ ID NO: 2147 - RNA, 20 nt, Artificial Sequence
  synthesized
gcagcuggggagggaagggc

SEQ ID NO: 2148 - RNA, 20 nt, Artificial Sequence
  synthesized
gcccuucccuccccagcugc

SEQ ID NO: 2149 - RNA, 20 nt, Artificial Sequence
  synthesized
gugagcccuucccuccccag

SEQ ID NO: 2150 - RNA, 20 nt, Artificial Sequence
  synthesized
ugggaagggcucaccuagag

SEQ ID NO: 2151 - RNA, 20 nt, Artificial Sequence
  synthesized
uucccuccccagcugcuucc

SEQ ID NO: 2152 - RNA, 20 nt, Artificial Sequence
  synthesized
aggugagcccuucccacuag

SEQ ID NO: 2153 - RNA, 20 nt, Artificial Sequence
  synthesized
aggugcccagcugcuuccuu

SEQ ID NO: 2154 - RNA, 20 nt, Artificial Sequence
  synthesized
cacuaggugcccagcugcuu

SEQ ID NO: 2155 - RNA, 20 nt, Artificial Sequence
  synthesized
ccaaggaagcagcugggcac

SEQ ID NO: 2156 - RNA, 20 nt, Artificial Sequence
  synthesized
cccacuaggugcccagcugc

SEQ ID NO: 2157 - RNA, 20 nt, Artificial Sequence
  synthesized
ccccagcugcuuccuugguc

SEQ ID NO: 2158 - RNA, 20 nt, Artificial Sequence
  synthesized
ccuucccacuaggugcccag

SEQ ID NO: 2159 - RNA, 20 nt, Artificial Sequence
  synthesized
cuaggugcccagcugcuucc

SEQ ID NO: 2160 - RNA, 20 nt, Artificial Sequence
  synthesized
gaccaaggaagcagcugggc

SEQ ID NO: 2161 - RNA, 20 nt, Artificial Sequence
  synthesized
gagcccuucccacuaggugc

SEQ ID NO: 2162 - RNA, 20 nt, Artificial Sequence
  synthesized
gcaccuagugggaagggcuc

SEQ ID NO: 2163 - RNA, 20 nt, Artificial Sequence
  synthesized
gcagcugggcaccuaguggg

SEQ ID NO: 2164 - RNA, 20 nt, Artificial Sequence
  synthesized
gcccagcugcuuccuugguc

SEQ ID NO: 2165 - RNA, 20 nt, Artificial Sequence
  synthesized
gcccuucccacuaggugccc

SEQ ID NO: 2166 - RNA, 20 nt, Artificial Sequence
  synthesized
gggcaccuagugggaagggc

SEQ ID NO: 2167 - RNA, 20 nt, Artificial Sequence
  synthesized
gugagcccuucccacuaggu

SEQ ID NO: 2168 - RNA, 20 nt, Artificial Sequence
  synthesized
gugcccagcugcuuccuugg

SEQ ID NO: 2169 - RNA, 20 nt, Artificial Sequence
  synthesized
uucccacuaggugcccagcu

SEQ ID NO: 2170 - RNA, 20 nt, Artificial Sequence
  synthesized
acuuaagcccaggaguuuag

SEQ ID NO: 2171 - RNA, 20 nt, Artificial Sequence
  synthesized
gguccuaaacuccugggcuu

SEQ ID NO: 2172 - RNA, 20 nt, Artificial Sequence
  synthesized
uuaagcccaggaguuuagga

SEQ ID NO: 2173 - RNA, 20 nt, Artificial Sequence
  synthesized
agccucgaccucacaggcuu

SEQ ID NO: 2174 - RNA, 20 nt, Artificial Sequence
  synthesized
agccuugaccucacaggcuu

SEQ ID NO: 2175 - RNA, 20 nt, Artificial Sequence
  synthesized
ccucgaccucacaggcuuca

SEQ ID NO: 2176 - RNA, 20 nt, Artificial Sequence
  synthesized
ccuugaccucacaggcuuca

SEQ ID NO: 2177 - RNA, 20 nt, Artificial Sequence
  synthesized
gcugaagccugugaggucaa

SEQ ID NO: 2178 - RNA, 20 nt, Artificial Sequence
  synthesized
gcugaagccugugaggucga

SEQ ID NO: 2179 - RNA, 20 nt, Artificial Sequence
  synthesized
ucgaccucacaggcuucagc

SEQ ID NO: 2180 - RNA, 20 nt, Artificial Sequence
  synthesized
ugaagccugugaggucaagg

SEQ ID NO: 2181 - RNA, 20 nt, Artificial Sequence
  synthesized
ugaagccugugaggucgagg

SEQ ID NO: 2182 - RNA, 20 nt, Artificial Sequence
  synthesized
uugaccucacaggcuucagc

SEQ ID NO: 2183 - RNA, 20 nt, Artificial Sequence
  synthesized
cagccucccaaagugcuggg

SEQ ID NO: 2184 - RNA, 20 nt, Artificial Sequence
  synthesized
uaaucccagcacuuugggag

SEQ ID NO: 2185 - RNA, 20 nt, Artificial Sequence
  synthesized
aauaagcccgagccacagcc

SEQ ID NO: 2186 - RNA, 20 nt, Artificial Sequence
  synthesized
aauaagccugagccacagcc

SEQ ID NO: 2187 - RNA, 20 nt, Artificial Sequence
  synthesized
agcccgagccacagcccccc

SEQ ID NO: 2188 - RNA, 20 nt, Artificial Sequence
  synthesized
agccugagccacagcccccc

SEQ ID NO: 2189 - RNA, 20 nt, Artificial Sequence
  synthesized
caggcuuauuccaguacaug

SEQ ID NO: 2190 - RNA, 20 nt, Artificial Sequence
  synthesized
cccgagccacagccccccua

SEQ ID NO: 2191 - RNA, 20 nt, Artificial Sequence
  synthesized
ccugagccacagccccccua

SEQ ID NO: 2192 - RNA, 20 nt, Artificial Sequence
  synthesized
cgagccacagccccccuaca

SEQ ID NO: 2193 - RNA, 20 nt, Artificial Sequence
  synthesized
cgggcuuauuccaguacaug

SEQ ID NO: 2194 - RNA, 20 nt, Artificial Sequence
  synthesized
cucaggcuuauuccaguaca

SEQ ID NO: 2195 - RNA, 20 nt, Artificial Sequence
  synthesized
cucgggcuuauuccaguaca

SEQ ID NO: 2196 - RNA, 20 nt, Artificial Sequence
  synthesized
cuggaauaagcccgagccac

SEQ ID NO: 2197 - RNA, 20 nt, Artificial Sequence
  synthesized
cuggaauaagccugagccac

SEQ ID NO: 2198 - RNA, 20 nt, Artificial Sequence
  synthesized
cuguggcucaggcuuauucc

SEQ ID NO: 2199 - RNA, 20 nt, Artificial Sequence
  synthesized
cuguggcucgggcuuauucc

SEQ ID NO: 2200 - RNA, 20 nt, Artificial Sequence
  synthesized
ggaauaagcccgagccacag

SEQ ID NO: 2201 - RNA, 20 nt, Artificial Sequence
  synthesized
ggaauaagccugagccacag

SEQ ID NO: 2202 - RNA, 20 nt, Artificial Sequence
  synthesized
ggcucaggcuuauuccagua

SEQ ID NO: 2203 - RNA, 20 nt, Artificial Sequence
  synthesized
ggcucgggcuuauuccagua

SEQ ID NO: 2204 - RNA, 20 nt, Artificial Sequence
  synthesized
ggcuguggcucaggcuuauu

SEQ ID NO: 2205 - RNA, 20 nt, Artificial Sequence
  synthesized
ggcuguggcucgggcuuauu

SEQ ID NO: 2206 - RNA, 20 nt, Artificial Sequence
  synthesized
ggggcuguggcucaggcuua

SEQ ID NO: 2207 - RNA, 20 nt, Artificial Sequence
  synthesized
ggggcuguggcucgggcuua

SEQ ID NO: 2208 - RNA, 20 nt, Artificial Sequence
  synthesized
ggggggcuguggcucaggcu

SEQ ID NO: 2209 - RNA, 20 nt, Artificial Sequence
  synthesized
ggggggcuguggcucgggcu

SEQ ID NO: 2210 - RNA, 20 nt, Artificial Sequence
  synthesized
guggcucaggcuuauuccag

SEQ ID NO: 2211 - RNA, 20 nt, Artificial Sequence
  synthesized
guggcucgggcuuauuccag

SEQ ID NO: 2212 - RNA, 20 nt, Artificial Sequence
  synthesized
uaagcccgagccacagcccc

SEQ ID NO: 2213 - RNA, 20 nt, Artificial Sequence
  synthesized
uaagccugagccacagcccc

SEQ ID NO: 2214 - RNA, 20 nt, Artificial Sequence
  synthesized
uacuggaauaagcccgagcc

SEQ ID NO: 2215 - RNA, 20 nt, Artificial Sequence
  synthesized
uacuggaauaagccugagcc

SEQ ID NO: 2216 - RNA, 20 nt, Artificial Sequence
  synthesized
uaggggggcuguggcucagg

SEQ ID NO: 2217 - RNA, 20 nt, Artificial Sequence
  synthesized
uaggggggcuguggcucggg

SEQ ID NO: 2218 - RNA, 20 nt, Artificial Sequence
  synthesized
ugagccacagccccccuaca

SEQ ID NO: 2219 - RNA, 20 nt, Artificial Sequence
  synthesized
uguacuggaauaagcccgag

SEQ ID NO: 2220 - RNA, 20 nt, Artificial Sequence
  synthesized
uguacuggaauaagccugag

SEQ ID NO: 2221 - RNA, 20 nt, Artificial Sequence
  synthesized
uguaggggggcuguggcuca

SEQ ID NO: 2222 - RNA, 20 nt, Artificial Sequence
  synthesized
uguaggggggcuguggcucg

SEQ ID NO: 2223 - RNA, 20 nt, Artificial Sequence
  synthesized
aacauaguucuggaugacaa

SEQ ID NO: 2224 - RNA, 20 nt, Artificial Sequence
  synthesized
aacauaguuguggaugacaa

SEQ ID NO: 2225 - RNA, 20 nt, Artificial Sequence
  synthesized
agaaaacauaguucuggaug

SEQ ID NO: 2226 - RNA, 20 nt, Artificial Sequence
  synthesized
agaaaacauaguuguggaug

SEQ ID NO: 2227 - RNA, 20 nt, Artificial Sequence
  synthesized
cacaacuauguuuucuuuuc

SEQ ID NO: 2228 - RNA, 20 nt, Artificial Sequence
  synthesized
cagaacuauguuuucuuuuc

SEQ ID NO: 2229 - RNA, 20 nt, Artificial Sequence
  synthesized
cauaguucuggaugacaaga

SEQ ID NO: 2230 - RNA, 20 nt, Artificial Sequence
  synthesized
cauaguuguggaugacaaga

SEQ ID NO: 2231 - RNA, 20 nt, Artificial Sequence
  synthesized
cauccacaacuauguuuucu

SEQ ID NO: 2232 - RNA, 20 nt, Artificial Sequence
  synthesized
cauccagaacuauguuuucu

SEQ ID NO: 2233 - RNA, 20 nt, Artificial Sequence
  synthesized
ccuggcucuugucauccaca

SEQ ID NO: 2234 - RNA, 20 nt, Artificial Sequence
  synthesized
ccuggcucuugucauccaga

SEQ ID NO: 2235 - RNA, 20 nt, Artificial Sequence
  synthesized
gcucuugucauccacaacua

SEQ ID NO: 2236 - RNA, 20 nt, Artificial Sequence
  synthesized
gcucuugucauccagaacua

SEQ ID NO: 2237 - RNA, 20 nt, Artificial Sequence
  synthesized
gucauccacaacuauguuuu

SEQ ID NO: 2238 - RNA, 20 nt, Artificial Sequence
  synthesized
gucauccagaacuauguuuu

SEQ ID NO: 2239 - RNA, 20 nt, Artificial Sequence
  synthesized
guucuggaugacaagagcca

SEQ ID NO: 2240 - RNA, 20 nt, Artificial Sequence
  synthesized
guuguggaugacaagagcca

SEQ ID NO: 2241 - RNA, 20 nt, Artificial Sequence
  synthesized
uaguucuggaugacaagagc

SEQ ID NO: 2242 - RNA, 20 nt, Artificial Sequence
  synthesized
uaguuguggaugacaagagc

SEQ ID NO: 2243 - RNA, 20 nt, Artificial Sequence
  synthesized
uccacaacuauguuuucuuu

SEQ ID NO: 2244 - RNA, 20 nt, Artificial Sequence
  synthesized
uccagaacuauguuuucuuu

SEQ ID NO: 2245 - RNA, 20 nt, Artificial Sequence
  synthesized
ucuggaugacaagagccagg

SEQ ID NO: 2246 - RNA, 20 nt, Artificial Sequence
  synthesized
ucuugucauccacaacuaug

SEQ ID NO: 2247 - RNA, 20 nt, Artificial Sequence
  synthesized
ucuugucauccagaacuaug

SEQ ID NO: 2248 - RNA, 20 nt, Artificial Sequence
  synthesized
uggcucuugucauccacaac

SEQ ID NO: 2249 - RNA, 20 nt, Artificial Sequence
  synthesized
uggcucuugucauccagaac

SEQ ID NO: 2250 - RNA, 20 nt, Artificial Sequence
  synthesized
uguggaugacaagagccagg

SEQ ID NO: 2251 - RNA, 20 nt, Artificial Sequence
  synthesized
uugucauccacaacuauguu

SEQ ID NO: 2252 - RNA, 20 nt, Artificial Sequence
  synthesized
uugucauccagaacuauguu

SEQ ID NO: 2253 - RNA, 20 nt, Artificial Sequence
  synthesized
aacgcaagaaagugagccca

SEQ ID NO: 2254 - RNA, 20 nt, Artificial Sequence
  synthesized
aacgcgagaaagugagccca

SEQ ID NO: 2255 - RNA, 20 nt, Artificial Sequence
  synthesized
aguagaaacgcaagaaagug

SEQ ID NO: 2256 - RNA, 20 nt, Artificial Sequence
  synthesized
aguagaaacgcgagaaagug

SEQ ID NO: 2257 - RNA, 20 nt, Artificial Sequence
  synthesized
caagaaagugagcccagagg

SEQ ID NO: 2258 - RNA, 20 nt, Artificial Sequence
  synthesized
cacuuucucgcguuucuacu

SEQ ID NO: 2259 - RNA, 20 nt, Artificial Sequence
  synthesized
cacuuucuugcguuucuacu

SEQ ID NO: 2260 - RNA, 20 nt, Artificial Sequence
  synthesized
ccucugggcucacuuucucg

SEQ ID NO: 2261 - RNA, 20 nt, Artificial Sequence
  synthesized
ccucugggcucacuuucuug

SEQ ID NO: 2262 - RNA, 20 nt, Artificial Sequence
  synthesized
cgagaaagugagcccagagg

SEQ ID NO: 2263 - RNA, 20 nt, Artificial Sequence
  synthesized
cgcaagaaagugagcccaga

SEQ ID NO: 2264 - RNA, 20 nt, Artificial Sequence
  synthesized
cgcgagaaagugagcccaga

SEQ ID NO: 2265 - RNA, 20 nt, Artificial Sequence
  synthesized
cgcguuucuacuuccaaaag

SEQ ID NO: 2266 - RNA, 20 nt, Artificial Sequence
  synthesized
cucacuuucucgcguuucua

SEQ ID NO: 2267 - RNA, 20 nt, Artificial Sequence
  synthesized
cucacuuucuugcguuucua

SEQ ID NO: 2268 - RNA, 20 nt, Artificial Sequence
  synthesized
cuuucucgcguuucuacuuc

SEQ ID NO: 2269 - RNA, 20 nt, Artificial Sequence
  synthesized
cuuucuugcguuucuacuuc

SEQ ID NO: 2270 - RNA, 20 nt, Artificial Sequence
  synthesized
gaaacgcaagaaagugagcc

SEQ ID NO: 2271 - RNA, 20 nt, Artificial Sequence
  synthesized
gaaacgcgagaaagugagcc

SEQ ID NO: 2272 - RNA, 20 nt, Artificial Sequence
  synthesized
ggcucacuuucucgcguuuc

SEQ ID NO: 2273 - RNA, 20 nt, Artificial Sequence
  synthesized
ggcucacuuucuugcguuuc

SEQ ID NO: 2274 - RNA, 20 nt, Artificial Sequence
  synthesized
uagaaacgcaagaaagugag

SEQ ID NO: 2275 - RNA, 20 nt, Artificial Sequence
  synthesized
uagaaacgcgagaaagugag

SEQ ID NO: 2276 - RNA, 20 nt, Artificial Sequence
  synthesized
ucugggcucacuuucucgcg

SEQ ID NO: 2277 - RNA, 20 nt, Artificial Sequence
  synthesized
ucugggcucacuuucuugcg

SEQ ID NO: 2278 - RNA, 20 nt, Artificial Sequence
  synthesized
ugcguuucuacuuccaaaag

SEQ ID NO: 2279 - RNA, 20 nt, Artificial Sequence
  synthesized
ugggcucacuuucucgcguu

SEQ ID NO: 2280 - RNA, 20 nt, Artificial Sequence
  synthesized
ugggcucacuuucuugcguu

SEQ ID NO: 2281 - RNA, 20 nt, Artificial Sequence
  synthesized
uuuggaaguagaaacgcaag

SEQ ID NO: 2282 - RNA, 20 nt, Artificial Sequence
  synthesized
uuuggaaguagaaacgcgag

SEQ ID NO: 2283 - RNA, 20 nt, Artificial Sequence
  synthesized
aagacagccacaccuuagua

SEQ ID NO: 2284 - RNA, 20 nt, Artificial Sequence
  synthesized
aagacagcuacaccuuagua

SEQ ID NO: 2285 - RNA, 20 nt, Artificial Sequence
  synthesized
aguauacuaagguguagcug

SEQ ID NO: 2286 - RNA, 20 nt, Artificial Sequence
  synthesized
aguauacuaagguguggcug

SEQ ID NO: 2287 - RNA, 20 nt, Artificial Sequence
  synthesized
auccaagacagccacaccuu

SEQ ID NO: 2288 - RNA, 20 nt, Artificial Sequence
  synthesized
auccaagacagcuacaccuu

SEQ ID NO: 2289 - RNA, 20 nt, Artificial Sequence
  synthesized
aucugaauccaagacagcca

SEQ ID NO: 2290 - RNA, 20 nt, Artificial Sequence
  synthesized
aucugaauccaagacagcua

SEQ ID NO: 2291 - RNA, 20 nt, Artificial Sequence
  synthesized
cacaccuuaguauacugccc

SEQ ID NO: 2292 - RNA, 20 nt, Artificial Sequence
  synthesized
cagccacaccuuaguauacu

SEQ ID NO: 2293 - RNA, 20 nt, Artificial Sequence
  synthesized
cagcuacaccuuaguauacu

SEQ ID NO: 2294 - RNA, 20 nt, Artificial Sequence
  synthesized
ccaagacagccacaccuuag

SEQ ID NO: 2295 - RNA, 20 nt, Artificial Sequence
  synthesized
ccaagacagcuacaccuuag

SEQ ID NO: 2296 - RNA, 20 nt, Artificial Sequence
  synthesized
cuaagguguagcugucuugg

SEQ ID NO: 2297 - RNA, 20 nt, Artificial Sequence
  synthesized
cuaagguguggcugucuugg

SEQ ID NO: 2298 - RNA, 20 nt, Artificial Sequence
  synthesized
cugaauccaagacagccaca

SEQ ID NO: 2299 - RNA, 20 nt, Artificial Sequence
  synthesized
cugaauccaagacagcuaca

SEQ ID NO: 2300 - RNA, 20 nt, Artificial Sequence
  synthesized
gaauccaagacagccacacc

SEQ ID NO: 2301 - RNA, 20 nt, Artificial Sequence
  synthesized
gaauccaagacagcuacacc

SEQ ID NO: 2302 - RNA, 20 nt, Artificial Sequence
  synthesized
gacagccacaccuuaguaua

SEQ ID NO: 2303 - RNA, 20 nt, Artificial Sequence
  synthesized
gacagcuacaccuuaguaua

SEQ ID NO: 2304 - RNA, 20 nt, Artificial Sequence
  synthesized
gcaguauacuaagguguagc

SEQ ID NO: 2305 - RNA, 20 nt, Artificial Sequence
  synthesized
gcaguauacuaagguguggc

SEQ ID NO: 2306 - RNA, 20 nt, Artificial Sequence
  synthesized
gccacaccuuaguauacugc

SEQ ID NO: 2307 - RNA, 20 nt, Artificial Sequence
  synthesized
gcuacaccuuaguauacugc

SEQ ID NO: 2308 - RNA, 20 nt, Artificial Sequence
  synthesized
gggcaguauacuaaggugua

SEQ ID NO: 2309 - RNA, 20 nt, Artificial Sequence
  synthesized
gggcaguauacuaaggugug

SEQ ID NO: 2310 - RNA, 20 nt, Artificial Sequence
  synthesized
uacaccuuaguauacugccc

SEQ ID NO: 2311 - RNA, 20 nt, Artificial Sequence
  synthesized
uauacuaagguguagcuguc

SEQ ID NO: 2312 - RNA, 20 nt, Artificial Sequence
  synthesized
uauacuaagguguggcuguc

SEQ ID NO: 2313 - RNA, 20 nt, Artificial Sequence
  synthesized
uguagcugucuuggauucag

SEQ ID NO: 2314 - RNA, 20 nt, Artificial Sequence
  synthesized
uguggcugucuuggauucag

SEQ ID NO: 2315 - RNA, 20 nt, Artificial Sequence
  synthesized
aagcuacgaugcuuggaugg

SEQ ID NO: 2316 - RNA, 20 nt, Artificial Sequence
  synthesized
aagcuaugaugcuuggaugg

SEQ ID NO: 2317 - RNA, 20 nt, Artificial Sequence
  synthesized
aucauagcuuaucagaaaac

SEQ ID NO: 2318 - RNA, 20 nt, Artificial Sequence
  synthesized
auccaagcaucauagcuuau

SEQ ID NO: 2319 - RNA, 20 nt, Artificial Sequence
  synthesized
auccaagcaucguagcuuau

SEQ ID NO: 2320 - RNA, 20 nt, Artificial Sequence
  synthesized
aucguagcuuaucagaaaac

SEQ ID NO: 2321 - RNA, 20 nt, Artificial Sequence
  synthesized
auguuuucugauaagcuacg

SEQ ID NO: 2322 - RNA, 20 nt, Artificial Sequence
  synthesized
auguuuucugauaagcuaug

SEQ ID NO: 2323 - RNA, 20 nt, Artificial Sequence
  synthesized
cacuucccauccaagcauca

SEQ ID NO: 2324 - RNA, 20 nt, Artificial Sequence
  synthesized
cacuucccauccaagcaucg

SEQ ID NO: 2325 - RNA, 20 nt, Artificial Sequence
  synthesized
cauagcuuaucagaaaacau

SEQ ID NO: 2326 - RNA, 20 nt, Artificial Sequence
  synthesized
ccauccaagcaucauagcuu

SEQ ID NO: 2327 - RNA, 20 nt, Artificial Sequence
  synthesized
ccauccaagcaucguagcuu

SEQ ID NO: 2328 - RNA, 20 nt, Artificial Sequence
  synthesized
cgaugcuuggaugggaagug

SEQ ID NO: 2329 - RNA, 20 nt, Artificial Sequence
  synthesized
cguagcuuaucagaaaacau

SEQ ID NO: 2330 - RNA, 20 nt, Artificial Sequence
  synthesized
cuucccauccaagcaucaua

SEQ ID NO: 2331 - RNA, 20 nt, Artificial Sequence
  synthesized
cuucccauccaagcaucgua

SEQ ID NO: 2332 - RNA, 20 nt, Artificial Sequence
  synthesized
gcaucauagcuuaucagaaa

SEQ ID NO: 2333 - RNA, 20 nt, Artificial Sequence
  synthesized
gcaucguagcuuaucagaaa

SEQ ID NO: 2334 - RNA, 20 nt, Artificial Sequence
  synthesized
guuuucugauaagcuacgau

SEQ ID NO: 2335 - RNA, 20 nt, Artificial Sequence
  synthesized
guuuucugauaagcuaugau

SEQ ID NO: 2336 - RNA, 20 nt, Artificial Sequence
  synthesized
ucccauccaagcaucauagc

SEQ ID NO: 2337 - RNA, 20 nt, Artificial Sequence
  synthesized
ucccauccaagcaucguagc

SEQ ID NO: 2338 - RNA, 20 nt, Artificial Sequence
  synthesized
ugauaagcuacgaugcuugg

SEQ ID NO: 2339 - RNA, 20 nt, Artificial Sequence
  synthesized
ugauaagcuaugaugcuugg

SEQ ID NO: 2340 - RNA, 20 nt, Artificial Sequence
  synthesized
ugaugcuuggaugggaagug

SEQ ID NO: 2341 - RNA, 20 nt, Artificial Sequence
  synthesized
uuucugauaagcuacgaugc

SEQ ID NO: 2342 - RNA, 20 nt, Artificial Sequence
  synthesized
uuucugauaagcuaugaugc

SEQ ID NO: 2343 - RNA, 20 nt, Artificial Sequence
  synthesized
aaauuucucuuuguggaugu

SEQ ID NO: 2344 - RNA, 20 nt, Artificial Sequence
  synthesized
acaaagagaaauuugacuuc

SEQ ID NO: 2345 - RNA, 20 nt, Artificial Sequence
  synthesized
acauccacaaagagaaauuu

SEQ ID NO: 2346 - RNA, 20 nt, Artificial Sequence
  synthesized
agagaaauuugacuuccuag

SEQ ID NO: 2347 - RNA, 20 nt, Artificial Sequence
  synthesized
agauaaauuugacuuccuag

SEQ ID NO: 2348 - RNA, 20 nt, Artificial Sequence
  synthesized
aggaagucaaauuucucuuu

SEQ ID NO: 2349 - RNA, 20 nt, Artificial Sequence
  synthesized
agucaaauuuaucuuugugg

SEQ ID NO: 2350 - RNA, 20 nt, Artificial Sequence
  synthesized
agucaaauuucucuuugugg

SEQ ID NO: 2351 - RNA, 20 nt, Artificial Sequence
  synthesized
agugacauccacaaagagaa

SEQ ID NO: 2352 - RNA, 20 nt, Artificial Sequence
  synthesized
agugacauccacaaagauaa

SEQ ID NO: 2353 - RNA, 20 nt, Artificial Sequence
  synthesized
auccacaaagagaaauuuga

SEQ ID NO: 2354 - RNA, 20 nt, Artificial Sequence
  synthesized
aucuuuguggaugucacucc

SEQ ID NO: 2355 - RNA, 20 nt, Artificial Sequence
  synthesized
auuuaucuuuguggauguca

SEQ ID NO: 2356 - RNA, 20 nt, Artificial Sequence
  synthesized
auuucucuuuguggauguca

SEQ ID NO: 2357 - RNA, 20 nt, Artificial Sequence
  synthesized
ccacaaagagaaauuugacu

SEQ ID NO: 2358 - RNA, 20 nt, Artificial Sequence
  synthesized
ccacaaagauaaauuugacu

SEQ ID NO: 2359 - RNA, 20 nt, Artificial Sequence
  synthesized
cuaggaagucaaauuuaucu

SEQ ID NO: 2360 - RNA, 20 nt, Artificial Sequence
  synthesized
cuaggaagucaaauuucucu

SEQ ID NO: 2361 - RNA, 20 nt, Artificial Sequence
  synthesized
cucuuuguggaugucacucc

SEQ ID NO: 2362 - RNA, 20 nt, Artificial Sequence
  synthesized
ggagugacauccacaaagag

SEQ ID NO: 2363 - RNA, 20 nt, Artificial Sequence
  synthesized
ggagugacauccacaaagau

SEQ ID NO: 2364 - RNA, 20 nt, Artificial Sequence
  synthesized
ucaaauuucucuuuguggau

SEQ ID NO: 2365 - RNA, 20 nt, Artificial Sequence
  synthesized
ugacauccacaaagagaaau

SEQ ID NO: 2366 - RNA, 20 nt, Artificial Sequence
  synthesized
ugacauccacaaagauaaau

SEQ ID NO: 2367 - RNA, 20 nt, Artificial Sequence
  synthesized
ugcuaggaagucaaauuuau

SEQ ID NO: 2368 - RNA, 20 nt, Artificial Sequence
  synthesized
ugcuaggaagucaaauuucu

SEQ ID NO: 2369 - RNA, 20 nt, Artificial Sequence
  synthesized
uuaucuuuguggaugucacu

SEQ ID NO: 2370 - RNA, 20 nt, Artificial Sequence
  synthesized
uucucuuuguggaugucacu

SEQ ID NO: 2371 - RNA, 20 nt, Artificial Sequence
  synthesized
aacauagcuaccaaauggug

SEQ ID NO: 2372 - RNA, 20 nt, Artificial Sequence
  synthesized
aaguuguccaaggcaacaua

SEQ ID NO: 2373 - RNA, 20 nt, Artificial Sequence
  synthesized
aaguuguccaaggccacaua

SEQ ID NO: 2374 - RNA, 20 nt, Artificial Sequence
  synthesized
caaggcaacauagcuaccaa

SEQ ID NO: 2375 - RNA, 20 nt, Artificial Sequence
  synthesized
cacauagcuaccaaauggug

SEQ ID NO: 2376 - RNA, 20 nt, Artificial Sequence
  synthesized
caccauuugguagcuaugug

SEQ ID NO: 2377 - RNA, 20 nt, Artificial Sequence
  synthesized
caccauuugguagcuauguu

SEQ ID NO: 2378 - RNA, 20 nt, Artificial Sequence
  synthesized
ccauuugguagcuauguugc

SEQ ID NO: 2379 - RNA, 20 nt, Artificial Sequence
  synthesized
gaguaaguuguccaaggcaa

SEQ ID NO: 2380 - RNA, 20 nt, Artificial Sequence
  synthesized
gaguaaguuguccaaggcca

SEQ ID NO: 2381 - RNA, 20 nt, Artificial Sequence
  synthesized
gcaacauagcuaccaaaugg

SEQ ID NO: 2382 - RNA, 20 nt, Artificial Sequence
  synthesized
gccacauagcuaccaaaugg

SEQ ID NO: 2383 - RNA, 20 nt, Artificial Sequence
  synthesized
gcuauguggccuuggacaac

SEQ ID NO: 2384 - RNA, 20 nt, Artificial Sequence
  synthesized
gcuauguugccuuggacaac

SEQ ID NO: 2385 - RNA, 20 nt, Artificial Sequence
  synthesized
gguagcuauguggccuugga

SEQ ID NO: 2386 - RNA, 20 nt, Artificial Sequence
  synthesized
gguagcuauguugccuugga

SEQ ID NO: 2387 - RNA, 20 nt, Artificial Sequence
  synthesized
guaaguuguccaaggcaaca

SEQ ID NO: 2388 - RNA, 20 nt, Artificial Sequence
  synthesized
guaaguuguccaaggccaca

SEQ ID NO: 2389 - RNA, 20 nt, Artificial Sequence
  synthesized
guuguccaaggcaacauagc

SEQ ID NO: 2390 - RNA, 20 nt, Artificial Sequence
  synthesized
guuguccaaggccacauagc

SEQ ID NO: 2391 - RNA, 20 nt, Artificial Sequence
  synthesized
uagcuauguggccuuggaca

SEQ ID NO: 2392 - RNA, 20 nt, Artificial Sequence
  synthesized
uagcuauguugccuuggaca

SEQ ID NO: 2393 - RNA, 20 nt, Artificial Sequence
  synthesized
uauguggccuuggacaacuu

SEQ ID NO: 2394 - RNA, 20 nt, Artificial Sequence
  synthesized
uauguugccuuggacaacuu

SEQ ID NO: 2395 - RNA, 20 nt, Artificial Sequence
  synthesized
uccaaggcaacauagcuacc

SEQ ID NO: 2396 - RNA, 20 nt, Artificial Sequence
  synthesized
uccaaggccacauagcuacc

SEQ ID NO: 2397 - RNA, 20 nt, Artificial Sequence
  synthesized
uggccuuggacaacuuacuc

SEQ ID NO: 2398 - RNA, 20 nt, Artificial Sequence
  synthesized
uguccaaggcaacauagcua

SEQ ID NO: 2399 - RNA, 20 nt, Artificial Sequence
  synthesized
uguggccuuggacaacuuac

SEQ ID NO: 2400 - RNA, 20 nt, Artificial Sequence
  synthesized
uguugccuuggacaacuuac

SEQ ID NO: 2401 - RNA, 20 nt, Artificial Sequence
  synthesized
uugccuuggacaacuuacuc

SEQ ID NO: 2402 - RNA, 20 nt, Artificial Sequence
  synthesized
uugguagcuauguugccuug

SEQ ID NO: 2403 - RNA, 20 nt, Artificial Sequence
  synthesized
agcuacugcacuugaccaac

SEQ ID NO: 2404 - RNA, 20 nt, Artificial Sequence
  synthesized
cgcuacugcacuugaccaac

SEQ ID NO: 2405 - RNA, 20 nt, Artificial Sequence
  synthesized
gucaagugcaguagcgcaca

SEQ ID NO: 2406 - RNA, 20 nt, Artificial Sequence
  synthesized
guuggucaagugcaguagcg

SEQ ID NO: 2407 - RNA, 20 nt, Artificial Sequence
  synthesized
guuggucaagugcaguagcu

SEQ ID NO: 2408 - RNA, 20 nt, Artificial Sequence
  synthesized
ugagcuacugcacuugacca

SEQ ID NO: 2409 - RNA, 20 nt, Artificial Sequence
  synthesized
ugcgcuacugcacuugacca

SEQ ID NO: 2410 - RNA, 20 nt, Artificial Sequence
  synthesized
uggucaagugcaguagcgca

SEQ ID NO: 2411 - RNA, 20 nt, Artificial Sequence
  synthesized
ugugagcuacugcacuugac

SEQ ID NO: 2412 - RNA, 20 nt, Artificial Sequence
  synthesized
ugugcgcuacugcacuugac

SEQ ID NO: 2413 - RNA, 20 nt, Artificial Sequence
  synthesized
agaggcccaucccucuucuc

SEQ ID NO: 2414 - RNA, 20 nt, Artificial Sequence
  synthesized
agaggccccucccucuucuc

SEQ ID NO: 2415 - RNA, 20 nt, Artificial Sequence
  synthesized
aggcccaucccucuucucca

SEQ ID NO: 2416 - RNA, 20 nt, Artificial Sequence
  synthesized
aggccccucccucuucucca

SEQ ID NO: 2417 - RNA, 20 nt, Artificial Sequence
  synthesized
aggggccucugagaagggac

SEQ ID NO: 2418 - RNA, 20 nt, Artificial Sequence
  synthesized
augggccucugagaagggac

SEQ ID NO: 2419 - RNA, 20 nt, Artificial Sequence
  synthesized
cccuucucagaggcccaucc

SEQ ID NO: 2420 - RNA, 20 nt, Artificial Sequence
  synthesized
cccuucucagaggccccucc

SEQ ID NO: 2421 - RNA, 20 nt, Artificial Sequence
  synthesized
cuucucagaggcccaucccu

SEQ ID NO: 2422 - RNA, 20 nt, Artificial Sequence
  synthesized
cuucucagaggccccucccu

SEQ ID NO: 2423 - RNA, 20 nt, Artificial Sequence
  synthesized
cuuggagaagagggaggggc

SEQ ID NO: 2424 - RNA, 20 nt, Artificial Sequence
  synthesized
cuuggagaagagggaugggc

SEQ ID NO: 2425 - RNA, 20 nt, Artificial Sequence
  synthesized
gaagagggaggggccucuga

SEQ ID NO: 2426 - RNA, 20 nt, Artificial Sequence
  synthesized
gaagagggaugggccucuga

SEQ ID NO: 2427 - RNA, 20 nt, Artificial Sequence
  synthesized
gacuuggagaagagggaggg

SEQ ID NO: 2428 - RNA, 20 nt, Artificial Sequence
  synthesized
gacuuggagaagagggaugg

SEQ ID NO: 2429 - RNA, 20 nt, Artificial Sequence
  synthesized
gagaagagggaggggccucu

SEQ ID NO: 2430 - RNA, 20 nt, Artificial Sequence
  synthesized
gagaagagggaugggccucu

SEQ ID NO: 2431 - RNA, 20 nt, Artificial Sequence
  synthesized
gcccaucccucuucuccaag

SEQ ID NO: 2432 - RNA, 20 nt, Artificial Sequence
  synthesized
gccccucccucuucuccaag

SEQ ID NO: 2433 - RNA, 20 nt, Artificial Sequence
  synthesized
ggaggggccucugagaaggg

SEQ ID NO: 2434 - RNA, 20 nt, Artificial Sequence
  synthesized
ggaugggccucugagaaggg

SEQ ID NO: 2435 - RNA, 20 nt, Artificial Sequence
  synthesized
gucccuucucagaggcccau

SEQ ID NO: 2436 - RNA, 20 nt, Artificial Sequence
  synthesized
gucccuucucagaggccccu

SEQ ID NO: 2437 - RNA, 20 nt, Artificial Sequence
  synthesized
ucagaggcccaucccucuuc

SEQ ID NO: 2438 - RNA, 20 nt, Artificial Sequence
  synthesized
ucagaggccccucccucuuc

SEQ ID NO: 2439 - RNA, 20 nt, Artificial Sequence
  synthesized
ucucagaggcccaucccucu

SEQ ID NO: 2440 - RNA, 20 nt, Artificial Sequence
  synthesized
ucucagaggccccucccucu

SEQ ID NO: 2441 - RNA, 20 nt, Artificial Sequence
  synthesized
uggagaagagggaggggccu

SEQ ID NO: 2442 - RNA, 20 nt, Artificial Sequence
  synthesized
uggagaagagggaugggccu

SEQ ID NO: 2443 - RNA, 20 nt, Artificial Sequence
  synthesized
acccuccggagaguaggagu

SEQ ID NO: 2444 - RNA, 20 nt, Artificial Sequence
  synthesized
acucuccggagggugggcuc

SEQ ID NO: 2445 - RNA, 20 nt, Artificial Sequence
  synthesized
agacuccuacucuccggagg

SEQ ID NO: 2446 - RNA, 20 nt, Artificial Sequence
  synthesized
aggagcccacccuccgagag

SEQ ID NO: 2447 - RNA, 20 nt, Artificial Sequence
  synthesized
aggagcccacccuccggaga

SEQ ID NO: 2448 - RNA, 20 nt, Artificial Sequence
  synthesized
cagacuccuacucucggagg

SEQ ID NO: 2449 - RNA, 20 nt, Artificial Sequence
  synthesized
ccacccuccgagaguaggag

SEQ ID NO: 2450 - RNA, 20 nt, Artificial Sequence
  synthesized
ccacccuccggagaguagga

SEQ ID NO: 2451 - RNA, 20 nt, Artificial Sequence
  synthesized
ccaggagcccacccuccgag

SEQ ID NO: 2452 - RNA, 20 nt, Artificial Sequence
  synthesized
ccaggagcccacccuccgga

SEQ ID NO: 2453 - RNA, 20 nt, Artificial Sequence
  synthesized
cccugccucagacuccuacu

SEQ ID NO: 2454 - RNA, 20 nt, Artificial Sequence
  synthesized
ccuacucucggagggugggc

SEQ ID NO: 2455 - RNA, 20 nt, Artificial Sequence
  synthesized
ccucagacuccuacucuccg

SEQ ID NO: 2456 - RNA, 20 nt, Artificial Sequence
  synthesized
ccuccggagaguaggagucu

SEQ ID NO: 2457 - RNA, 20 nt, Artificial Sequence
  synthesized
cggagaguaggagucugagg

SEQ ID NO: 2458 - RNA, 20 nt, Artificial Sequence
  synthesized
cuacucuccggagggugggc

SEQ ID NO: 2459 - RNA, 20 nt, Artificial Sequence
  synthesized
cuccuacucucggagggugg

SEQ ID NO: 2460 - RNA, 20 nt, Artificial Sequence
  synthesized
cucucggagggugggcuccu

SEQ ID NO: 2461 - RNA, 20 nt, Artificial Sequence
  synthesized
gcccacccuccgagaguagg

SEQ ID NO: 2462 - RNA, 20 nt, Artificial Sequence
  synthesized
gcccacccuccggagaguag

SEQ ID NO: 2463 - RNA, 20 nt, Artificial Sequence
  synthesized
gccucagacuccuacucucg

SEQ ID NO: 2464 - RNA, 20 nt, Artificial Sequence
  synthesized
uacucucggagggugggcuc

SEQ ID NO: 2465 - RNA, 20 nt, Artificial Sequence
  synthesized
uccgagaguaggagucugag

SEQ ID NO: 2466 - RNA, 20 nt, Artificial Sequence
  synthesized
uccggagaguaggagucuga

SEQ ID NO: 2467 - RNA, 20 nt, Artificial Sequence
  synthesized
uccuacucuccggagggugg

SEQ ID NO: 2468 - RNA, 20 nt, Artificial Sequence
  synthesized
ucuccggagggugggcuccu

SEQ ID NO: 2469 - RNA, 20 nt, Artificial Sequence
  synthesized
aacagcacuggauacccaug

SEQ ID NO: 2470 - RNA, 20 nt, Artificial Sequence
  synthesized
aagcgagaacagcacuggau

SEQ ID NO: 2471 - RNA, 20 nt, Artificial Sequence
  synthesized
aaggguuucuuccacgguau

SEQ ID NO: 2472 - RNA, 20 nt, Artificial Sequence
  synthesized
aaggguuucuuccaugggua

SEQ ID NO: 2473 - RNA, 20 nt, Artificial Sequence
  synthesized
accguggaagaaacccuuga

SEQ ID NO: 2474 - RNA, 20 nt, Artificial Sequence
  synthesized
acucaaggguuucuuccacg

SEQ ID NO: 2475 - RNA, 20 nt, Artificial Sequence
  synthesized
acucaaggguuucuuccaug

SEQ ID NO: 2476 - RNA, 20 nt, Artificial Sequence
  synthesized
acuggauacccauggaagaa

SEQ ID NO: 2477 - RNA, 20 nt, Artificial Sequence
  synthesized
agcacuggauaccguggaag

SEQ ID NO: 2478 - RNA, 20 nt, Artificial Sequence
  synthesized
auaccguggaagaaacccuu

SEQ ID NO: 2479 - RNA, 20 nt, Artificial Sequence
  synthesized
cacgguauccagugcuguuc

SEQ ID NO: 2480 - RNA, 20 nt, Artificial Sequence
  synthesized
cacuggauaccguggaagaa

SEQ ID NO: 2481 - RNA, 20 nt, Artificial Sequence
  synthesized
cauggguauccagugcuguu

SEQ ID NO: 2482 - RNA, 20 nt, Artificial Sequence
  synthesized
cccauggaagaaacccuuga

SEQ ID NO: 2483 - RNA, 20 nt, Artificial Sequence
  synthesized
cgguauccagugcuguucuc

SEQ ID NO: 2484 - RNA, 20 nt, Artificial Sequence
  synthesized
cuggauaccguggaagaaac

SEQ ID NO: 2485 - RNA, 20 nt, Artificial Sequence
  synthesized
cuuccacgguauccagugcu

SEQ ID NO: 2486 - RNA, 20 nt, Artificial Sequence
  synthesized
cuuccauggguauccagugc

SEQ ID NO: 2487 - RNA, 20 nt, Artificial Sequence
  synthesized
gaacagcacuggauaccgug

SEQ ID NO: 2488 - RNA, 20 nt, Artificial Sequence
  synthesized
gcacuggauacccauggaag

SEQ ID NO: 2489 - RNA, 20 nt, Artificial Sequence
  synthesized
ggguuucuuccauggguauc

SEQ ID NO: 2490 - RNA, 20 nt, Artificial Sequence
  synthesized
guuucuuccacgguauccag

SEQ ID NO: 2491 - RNA, 20 nt, Artificial Sequence
  synthesized
guuucuuccauggguaucca

SEQ ID NO: 2492 - RNA, 20 nt, Artificial Sequence
  synthesized
uacccauggaagaaacccuu

SEQ ID NO: 2493 - RNA, 20 nt, Artificial Sequence
  synthesized
ucaaggguuucuuccacggu

SEQ ID NO: 2494 - RNA, 20 nt, Artificial Sequence
  synthesized
ucaaggguuucuuccauggg

SEQ ID NO: 2495 - RNA, 20 nt, Artificial Sequence
  synthesized
uccacgguauccagugcugu

SEQ ID NO: 2496 - RNA, 20 nt, Artificial Sequence
  synthesized
uccauggguauccagugcug

SEQ ID NO: 2497 - RNA, 20 nt, Artificial Sequence
  synthesized
uggauacccauggaagaaac

SEQ ID NO: 2498 - RNA, 20 nt, Artificial Sequence
  synthesized
uggguauccagugcuguucu

SEQ ID NO: 2499 - RNA, 20 nt, Artificial Sequence
  synthesized
uucuuccacgguauccagug

SEQ ID NO: 2500 - RNA, 20 nt, Artificial Sequence
  synthesized
uucuuccauggguauccagu

SEQ ID NO: 2501 - RNA, 20 nt, Artificial Sequence
  synthesized
acacccccacacuacagugg

SEQ ID NO: 2502 - RNA, 20 nt, Artificial Sequence
  synthesized
acacucccacacuacagugg

SEQ ID NO: 2503 - RNA, 20 nt, Artificial Sequence
  synthesized
acccccacacuacaguggua

SEQ ID NO: 2504 - RNA, 20 nt, Artificial Sequence
  synthesized
acucccacacuacaguggua

SEQ ID NO: 2505 - RNA, 20 nt, Artificial Sequence
  synthesized
acuguagugugggaguguug

SEQ ID NO: 2506 - RNA, 20 nt, Artificial Sequence
  synthesized
acuguaguguggggguguug

SEQ ID NO: 2507 - RNA, 20 nt, Artificial Sequence
  synthesized
aucaacacccccacacuaca

SEQ ID NO: 2508 - RNA, 20 nt, Artificial Sequence
  synthesized
aucaacacucccacacuaca

SEQ ID NO: 2509 - RNA, 20 nt, Artificial Sequence
  synthesized
cacuaucaacacccccacac

SEQ ID NO: 2510 - RNA, 20 nt, Artificial Sequence
  synthesized
cacuaucaacacucccacac

SEQ ID NO: 2511 - RNA, 20 nt, Artificial Sequence
  synthesized
cccacuaucaacacccccac

SEQ ID NO: 2512 - RNA, 20 nt, Artificial Sequence
  synthesized
cccacuaucaacacucccac

SEQ ID NO: 2513 - RNA, 20 nt, Artificial Sequence
  synthesized
ccccacacuacagugguaga

SEQ ID NO: 2514 - RNA, 20 nt, Artificial Sequence
  synthesized
ccuccccacuaucaacaccc

SEQ ID NO: 2515 - RNA, 20 nt, Artificial Sequence
  synthesized
ccuccccacuaucaacacuc

SEQ ID NO: 2516 - RNA, 20 nt, Artificial Sequence
  synthesized
cuaucaacacccccacacua

SEQ ID NO: 2517 - RNA, 20 nt, Artificial Sequence
  synthesized
cuaucaacacucccacacua

SEQ ID NO: 2518 - RNA, 20 nt, Artificial Sequence
  synthesized
gaguguugauaguggggagg

SEQ ID NO: 2519 - RNA, 20 nt, Artificial Sequence
  synthesized
gggaguguugauagugggga

SEQ ID NO: 2520 - RNA, 20 nt, Artificial Sequence
  synthesized
ggggguguugauagugggga

SEQ ID NO: 2521 - RNA, 20 nt, Artificial Sequence
  synthesized
ggguguugauaguggggagg

SEQ ID NO: 2522 - RNA, 20 nt, Artificial Sequence
  synthesized
gugggaguguugauaguggg

SEQ ID NO: 2523 - RNA, 20 nt, Artificial Sequence
  synthesized
guggggguguugauaguggg

SEQ ID NO: 2524 - RNA, 20 nt, Artificial Sequence
  synthesized
ucccacacuacagugguaga

SEQ ID NO: 2525 - RNA, 20 nt, Artificial Sequence
  synthesized
uccccacuaucaacaccccc

SEQ ID NO: 2526 - RNA, 20 nt, Artificial Sequence
  synthesized
uccccacuaucaacacuccc

SEQ ID NO: 2527 - RNA, 20 nt, Artificial Sequence
  synthesized
ucuaccacuguaguguggga

SEQ ID NO: 2528 - RNA, 20 nt, Artificial Sequence
  synthesized
ucuaccacuguagugugggg

SEQ ID NO: 2529 - RNA, 20 nt, Artificial Sequence
  synthesized
acggguguaagccaaagggc

SEQ ID NO: 2530 - RNA, 20 nt, Artificial Sequence
  synthesized
auggguguaagccaaagggc

SEQ ID NO: 2531 - RNA, 20 nt, Artificial Sequence
  synthesized
ccuuuggcuuacacccauaa

SEQ ID NO: 2532 - RNA, 20 nt, Artificial Sequence
  synthesized
ccuuuggcuuacacccguaa

SEQ ID NO: 2533 - RNA, 20 nt, Artificial Sequence
  synthesized
cugggauuacggguguaagc

SEQ ID NO: 2534 - RNA, 20 nt, Artificial Sequence
  synthesized
cugggauuauggguguaagc

SEQ ID NO: 2535 - RNA, 20 nt, Artificial Sequence
  synthesized
gcccuuuggcuuacacccau

SEQ ID NO: 2536 - RNA, 20 nt, Artificial Sequence
  synthesized
gcccuuuggcuuacacccgu

SEQ ID NO: 2537 - RNA, 20 nt, Artificial Sequence
  synthesized
uuacggguguaagccaaagg

SEQ ID NO: 2538 - RNA, 20 nt, Artificial Sequence
  synthesized
uuauggguguaagccaaagg

SEQ ID NO: 2539 - RNA, 20 nt, Artificial Sequence
  synthesized
uuuggcuuacacccauaauc

SEQ ID NO: 2540 - RNA, 20 nt, Artificial Sequence
  synthesized
uuuggcuuacacccguaauc

SEQ ID NO: 2541 - RNA, 20 nt, Artificial Sequence
  synthesized
aaaguccagacccaacuuca

SEQ ID NO: 2542 - RNA, 20 nt, Artificial Sequence
  synthesized
aaaguccggacccaacuuca

SEQ ID NO: 2543 - RNA, 20 nt, Artificial Sequence
  synthesized
acacuuugaaguuggguccg

SEQ ID NO: 2544 - RNA, 20 nt, Artificial Sequence
  synthesized
acacuuugaaguugggucug

SEQ ID NO: 2545 - RNA, 20 nt, Artificial Sequence
  synthesized
acuuggcacuucaaagucca

SEQ ID NO: 2546 - RNA, 20 nt, Artificial Sequence
  synthesized
acuuggcacuucaaaguccg

SEQ ID NO: 2547 - RNA, 20 nt, Artificial Sequence
  synthesized
acuuugaaguuggguccgga

SEQ ID NO: 2548 - RNA, 20 nt, Artificial Sequence
  synthesized
acuuugaaguugggucugga

SEQ ID NO: 2549 - RNA, 20 nt, Artificial Sequence
  synthesized
aguccagacccaacuucaaa

SEQ ID NO: 2550 - RNA, 20 nt, Artificial Sequence
  synthesized
aguccggacccaacuucaaa

SEQ ID NO: 2551 - RNA, 20 nt, Artificial Sequence
  synthesized
cacuucaaaguccagaccca

SEQ ID NO: 2552 - RNA, 20 nt, Artificial Sequence
  synthesized
cacuucaaaguccggaccca

SEQ ID NO: 2553 - RNA, 20 nt, Artificial Sequence
  synthesized
cggacuuugaagugccaagu

SEQ ID NO: 2554 - RNA, 20 nt, Artificial Sequence
  synthesized
cuucaaaguccagacccaac

SEQ ID NO: 2555 - RNA, 20 nt, Artificial Sequence
  synthesized
cuucaaaguccggacccaac

SEQ ID NO: 2556 - RNA, 20 nt, Artificial Sequence
  synthesized
ggcacuucaaaguccagacc

SEQ ID NO: 2557 - RNA, 20 nt, Artificial Sequence
  synthesized
ggcacuucaaaguccggacc

SEQ ID NO: 2558 - RNA, 20 nt, Artificial Sequence
  synthesized
gguccggacuuugaagugcc

SEQ ID NO: 2559 - RNA, 20 nt, Artificial Sequence
  synthesized
ggucuggacuuugaagugcc

SEQ ID NO: 2560 - RNA, 20 nt, Artificial Sequence
  synthesized
guuggguccggacuuugaag

SEQ ID NO: 2561 - RNA, 20 nt, Artificial Sequence
  synthesized
guugggucuggacuuugaag

SEQ ID NO: 2562 - RNA, 20 nt, Artificial Sequence
  synthesized
ucaaaguccagacccaacuu

SEQ ID NO: 2563 - RNA, 20 nt, Artificial Sequence
  synthesized
ucaaaguccggacccaacuu

SEQ ID NO: 2564 - RNA, 20 nt, Artificial Sequence
  synthesized
uccggacuuugaagugccaa

SEQ ID NO: 2565 - RNA, 20 nt, Artificial Sequence
  synthesized
ucuggacuuugaagugccaa

SEQ ID NO: 2566 - RNA, 20 nt, Artificial Sequence
  synthesized
ugaaguuggguccggacuuu

SEQ ID NO: 2567 - RNA, 20 nt, Artificial Sequence
  synthesized
ugaaguugggucuggacuuu

SEQ ID NO: 2568 - RNA, 20 nt, Artificial Sequence
  synthesized
uggacuuugaagugccaagu

SEQ ID NO: 2569 - RNA, 20 nt, Artificial Sequence
  synthesized
uggguccggacuuugaagug

SEQ ID NO: 2570 - RNA, 20 nt, Artificial Sequence
  synthesized
ugggucuggacuuugaagug

SEQ ID NO: 2571 - RNA, 20 nt, Artificial Sequence
  synthesized
uuggcacuucaaaguccaga

SEQ ID NO: 2572 - RNA, 20 nt, Artificial Sequence
  synthesized
uuggcacuucaaaguccgga

SEQ ID NO: 2573 - RNA, 20 nt, Artificial Sequence
  synthesized
uuugaaguuggguccggacu

SEQ ID NO: 2574 - RNA, 20 nt, Artificial Sequence
  synthesized
uuugaaguugggucuggacu

SEQ ID NO: 2575 - RNA, 20 nt, Artificial Sequence
  synthesized
aauaggaaugaugugugugu

SEQ ID NO: 2576 - RNA, 20 nt, Artificial Sequence
  synthesized
acacacacacacaucauucc

SEQ ID NO: 2577 - RNA, 20 nt, Artificial Sequence
  synthesized
acacacacacacgcauuccu

SEQ ID NO: 2578 - RNA, 20 nt, Artificial Sequence
  synthesized
acacacacacaucauuccua

SEQ ID NO: 2579 - RNA, 20 nt, Artificial Sequence
  synthesized
acacacacacgcauuccuau

SEQ ID NO: 2580 - RNA, 20 nt, Artificial Sequence
  synthesized
acacacacaucauuccuauu

SEQ ID NO: 2581 - RNA, 20 nt, Artificial Sequence
  synthesized
acacacacgcauuccuauuc

SEQ ID NO: 2582 - RNA, 20 nt, Artificial Sequence
  synthesized
acacacaucauuccuauucc

SEQ ID NO: 2583 - RNA, 20 nt, Artificial Sequence
  synthesized
acacacgcauuccuauuccu

SEQ ID NO: 2584 - RNA, 20 nt, Artificial Sequence
  synthesized
acacaucauuccuauuccuc

SEQ ID NO: 2585 - RNA, 20 nt, Artificial Sequence
  synthesized
acacgcauuccuauuccucu

SEQ ID NO: 2586 - RNA, 20 nt, Artificial Sequence
  synthesized
acaucauuccuauuccucua

SEQ ID NO: 2587 - RNA, 20 nt, Artificial Sequence
  synthesized
acgcauuccuauuccucuaa

SEQ ID NO: 2588 - RNA, 20 nt, Artificial Sequence
  synthesized
agaggaauaggaaugcgugu

SEQ ID NO: 2589 - RNA, 20 nt, Artificial Sequence
  synthesized
aggaauaggaaugcgugugu

SEQ ID NO: 2590 - RNA, 20 nt, Artificial Sequence
  synthesized
auuuagaggaauaggaaugc

SEQ ID NO: 2591 - RNA, 20 nt, Artificial Sequence
  synthesized
gaauaggaaugcgugugugu

SEQ ID NO: 2592 - RNA, 20 nt, Artificial Sequence
  synthesized
gaauuuagaggaauaggaau

SEQ ID NO: 2593 - RNA, 20 nt, Artificial Sequence
  synthesized
gaggaauaggaaugaugugu

SEQ ID NO: 2594 - RNA, 20 nt, Artificial Sequence
  synthesized
gcauuccuauuccucuaaau

SEQ ID NO: 2595 - RNA, 20 nt, Artificial Sequence
  synthesized
ggaauaggaaugaugugugu

SEQ ID NO: 2596 - RNA, 20 nt, Artificial Sequence
  synthesized
gggaauuuagaggaauagga

SEQ ID NO: 2597 - RNA, 20 nt, Artificial Sequence
  synthesized
uagaggaauaggaaugaugu

SEQ ID NO: 2598 - RNA, 20 nt, Artificial Sequence
  synthesized
uuagaggaauaggaaugcgu

SEQ ID NO: 2599 - RNA, 20 nt, Artificial Sequence
  synthesized
uuuagaggaauaggaaugau

SEQ ID NO: 2600 - RNA, 20 nt, Artificial Sequence
  synthesized
aauccaccagacccccuccc

SEQ ID NO: 2601 - RNA, 20 nt, Artificial Sequence
  synthesized
aauccgccagacccccuccc

SEQ ID NO: 2602 - RNA, 20 nt, Artificial Sequence
  synthesized
aggggagggggucuggcgga

SEQ ID NO: 2603 - RNA, 20 nt, Artificial Sequence
  synthesized
aggggagggggucuggugga

SEQ ID NO: 2604 - RNA, 20 nt, Artificial Sequence
  synthesized
cagaaauccaccagaccccc

SEQ ID NO: 2605 - RNA, 20 nt, Artificial Sequence
  synthesized
cagaaauccgccagaccccc

SEQ ID NO: 2606 - RNA, 20 nt, Artificial Sequence
  synthesized
cccagaaauccaccagaccc

SEQ ID NO: 2607 - RNA, 20 nt, Artificial Sequence
  synthesized
cccagaaauccgccagaccc

SEQ ID NO: 2608 - RNA, 20 nt, Artificial Sequence
  synthesized
cuggcggauuucugggacca

SEQ ID NO: 2609 - RNA, 20 nt, Artificial Sequence
  synthesized
cugguggauuucugggacca

SEQ ID NO: 2610 - RNA, 20 nt, Artificial Sequence
  synthesized
gaaauccaccagacccccuc

SEQ ID NO: 2611 - RNA, 20 nt, Artificial Sequence
  synthesized
gaaauccgccagacccccuc

SEQ ID NO: 2612 - RNA, 20 nt, Artificial Sequence
  synthesized
ggaggggagggggucuggcg

SEQ ID NO: 2613 - RNA, 20 nt, Artificial Sequence
  synthesized
ggaggggagggggucuggug

SEQ ID NO: 2614 - RNA, 20 nt, Artificial Sequence
  synthesized
gggagggggucuggcggauu

SEQ ID NO: 2615 - RNA, 20 nt, Artificial Sequence
  synthesized
gggagggggucugguggauu

SEQ ID NO: 2616 - RNA, 20 nt, Artificial Sequence
  synthesized
gucccagaaauccaccagac

SEQ ID NO: 2617 - RNA, 20 nt, Artificial Sequence
  synthesized
gucccagaaauccgccagac

SEQ ID NO: 2618 - RNA, 20 nt, Artificial Sequence
  synthesized
gucuggcggauuucugggac

SEQ ID NO: 2619 - RNA, 20 nt, Artificial Sequence
  synthesized
gucugguggauuucugggac

SEQ ID NO: 2620 - RNA, 20 nt, Artificial Sequence
  synthesized
uccaccagacccccuccccu

SEQ ID NO: 2621 - RNA, 20 nt, Artificial Sequence
  synthesized
uccgccagacccccuccccu

SEQ ID NO: 2622 - RNA, 20 nt, Artificial Sequence
  synthesized
uggucccagaaauccaccag

SEQ ID NO: 2623 - RNA, 20 nt, Artificial Sequence
  synthesized
uggucccagaaauccgccag

SEQ ID NO: 2624 - RNA, 20 nt, Artificial Sequence
  synthesized
aaauguuuccaaugguucag

SEQ ID NO: 2625 - RNA, 20 nt, Artificial Sequence
  synthesized
aaauguuuccagugguucag

SEQ ID NO: 2626 - RNA, 20 nt, Artificial Sequence
  synthesized
aagcuagacugaaccacugg

SEQ ID NO: 2627 - RNA, 20 nt, Artificial Sequence
  synthesized
aagcuagacugaaccauugg

SEQ ID NO: 2628 - RNA, 20 nt, Artificial Sequence
  synthesized
aaugguucagucuagcuuuc

SEQ ID NO: 2629 - RNA, 20 nt, Artificial Sequence
  synthesized
accacuggaaacauuuaacu

SEQ ID NO: 2630 - RNA, 20 nt, Artificial Sequence
  synthesized
accauuggaaacauuuaacu

SEQ ID NO: 2631 - RNA, 20 nt, Artificial Sequence
  synthesized
agugguucagucuagcuuuc

SEQ ID NO: 2632 - RNA, 20 nt, Artificial Sequence
  synthesized
aguuaaauguuuccaauggu

SEQ ID NO: 2633 - RNA, 20 nt, Artificial Sequence
  synthesized
aguuaaauguuuccaguggu

SEQ ID NO: 2634 - RNA, 20 nt, Artificial Sequence
  synthesized
auguuuccaaugguucaguc

SEQ ID NO: 2635 - RNA, 20 nt, Artificial Sequence
  synthesized
auguuuccagugguucaguc

SEQ ID NO: 2636 - RNA, 20 nt, Artificial Sequence
  synthesized
cacuggaaacauuuaacuca

SEQ ID NO: 2637 - RNA, 20 nt, Artificial Sequence
  synthesized
cauuggaaacauuuaacuca

SEQ ID NO: 2638 - RNA, 20 nt, Artificial Sequence
  synthesized
ccaaugguucagucuagcuu

SEQ ID NO: 2639 - RNA, 20 nt, Artificial Sequence
  synthesized
ccagugguucagucuagcuu

SEQ ID NO: 2640 - RNA, 20 nt, Artificial Sequence
  synthesized
cugaaccacuggaaacauuu

SEQ ID NO: 2641 - RNA, 20 nt, Artificial Sequence
  synthesized
cugaaccauuggaaacauuu

SEQ ID NO: 2642 - RNA, 20 nt, Artificial Sequence
  synthesized
cuggaaacauuuaacucaga

SEQ ID NO: 2643 - RNA, 20 nt, Artificial Sequence
  synthesized
gaaccacuggaaacauuuaa

SEQ ID NO: 2644 - RNA, 20 nt, Artificial Sequence
  synthesized
gaaccauuggaaacauuuaa

SEQ ID NO: 2645 - RNA, 20 nt, Artificial Sequence
  synthesized
gacugaaccacuggaaacau

SEQ ID NO: 2646 - RNA, 20 nt, Artificial Sequence
  synthesized
gacugaaccauuggaaacau

SEQ ID NO: 2647 - RNA, 20 nt, Artificial Sequence
  synthesized
gcuagacugaaccacuggaa

SEQ ID NO: 2648 - RNA, 20 nt, Artificial Sequence
  synthesized
gcuagacugaaccauuggaa

SEQ ID NO: 2649 - RNA, 20 nt, Artificial Sequence
  synthesized
guuuccaaugguucagucua

SEQ ID NO: 2650 - RNA, 20 nt, Artificial Sequence
  synthesized
guuuccagugguucagucua

SEQ ID NO: 2651 - RNA, 20 nt, Artificial Sequence
  synthesized
uagacugaaccacuggaaac

SEQ ID NO: 2652 - RNA, 20 nt, Artificial Sequence
  synthesized
uagacugaaccauuggaaac

SEQ ID NO: 2653 - RNA, 20 nt, Artificial Sequence
  synthesized
ugaguuaaauguuuccaaug

SEQ ID NO: 2654 - RNA, 20 nt, Artificial Sequence
  synthesized
ugaguuaaauguuuccagug

SEQ ID NO: 2655 - RNA, 20 nt, Artificial Sequence
  synthesized
uuaaauguuuccaaugguuc

SEQ ID NO: 2656 - RNA, 20 nt, Artificial Sequence
  synthesized
uuaaauguuuccagugguuc

SEQ ID NO: 2657 - RNA, 20 nt, Artificial Sequence
  synthesized
uuggaaacauuuaacucaga

SEQ ID NO: 2658 - RNA, 20 nt, Artificial Sequence
  synthesized
aaaggcagugacucagccaa

SEQ ID NO: 2659 - RNA, 20 nt, Artificial Sequence
  synthesized
aaaggcagugacucagccga

SEQ ID NO: 2660 - RNA, 20 nt, Artificial Sequence
  synthesized
aagugauacacucagggaca

SEQ ID NO: 2661 - RNA, 20 nt, Artificial Sequence
  synthesized
acucagccaagugauacacu

SEQ ID NO: 2662 - RNA, 20 nt, Artificial Sequence
  synthesized
acucagccgagugauacacu

SEQ ID NO: 2663 - RNA, 20 nt, Artificial Sequence
  synthesized
acucggcugagucacugccu

SEQ ID NO: 2664 - RNA, 20 nt, Artificial Sequence
  synthesized
acuuggcugagucacugccu

SEQ ID NO: 2665 - RNA, 20 nt, Artificial Sequence
  synthesized
agccaagugauacacucagg

SEQ ID NO: 2666 - RNA, 20 nt, Artificial Sequence
  synthesized
agccgagugauacacucagg

SEQ ID NO: 2667 - RNA, 20 nt, Artificial Sequence
  synthesized
aggcagugacucagccaagu

SEQ ID NO: 2668 - RNA, 20 nt, Artificial Sequence
  synthesized
aggcagugacucagccgagu

SEQ ID NO: 2669 - RNA, 20 nt, Artificial Sequence
  synthesized
agugacucagccaagugaua

SEQ ID NO: 2670 - RNA, 20 nt, Artificial Sequence
  synthesized
aguguaucacuuggcugagu

SEQ ID NO: 2671 - RNA, 20 nt, Artificial Sequence
  synthesized
ccaagugauacacucaggga

SEQ ID NO: 2672 - RNA, 20 nt, Artificial Sequence
  synthesized
ccgagugauacacucaggga

SEQ ID NO: 2673 - RNA, 20 nt, Artificial Sequence
  synthesized
ccugaguguaucacucggcu

SEQ ID NO: 2674 - RNA, 20 nt, Artificial Sequence
  synthesized
ccugaguguaucacuuggcu

SEQ ID NO: 2675 - RNA, 20 nt, Artificial Sequence
  synthesized
gagugauacacucagggaca

SEQ ID NO: 2676 - RNA, 20 nt, Artificial Sequence
  synthesized
gcagugacucagccaaguga

SEQ ID NO: 2677 - RNA, 20 nt, Artificial Sequence
  synthesized
gcagugacucagccgaguga

SEQ ID NO: 2678 - RNA, 20 nt, Artificial Sequence
  synthesized
uaucacucggcugagucacu

SEQ ID NO: 2679 - RNA, 20 nt, Artificial Sequence
  synthesized
uaucacuuggcugagucacu

SEQ ID NO: 2680 - RNA, 20 nt, Artificial Sequence
  synthesized
ucacucggcugagucacugc

SEQ ID NO: 2681 - RNA, 20 nt, Artificial Sequence
  synthesized
ucacuuggcugagucacugc

SEQ ID NO: 2682 - RNA, 20 nt, Artificial Sequence
  synthesized
ucggcugagucacugccuuu

SEQ ID NO: 2683 - RNA, 20 nt, Artificial Sequence
  synthesized
ugacucagccaagugauaca

SEQ ID NO: 2684 - RNA, 20 nt, Artificial Sequence
  synthesized
ugacucagccgagugauaca

SEQ ID NO: 2685 - RNA, 20 nt, Artificial Sequence
  synthesized
ugaguguaucacucggcuga

SEQ ID NO: 2686 - RNA, 20 nt, Artificial Sequence
  synthesized
ugaguguaucacuuggcuga

SEQ ID NO: 2687 - RNA, 20 nt, Artificial Sequence
  synthesized
uguaucacucggcugaguca

SEQ ID NO: 2688 - RNA, 20 nt, Artificial Sequence
  synthesized
uguaucacuuggcugaguca

SEQ ID NO: 2689 - RNA, 20 nt, Artificial Sequence
  synthesized
ugucccugaguguaucacuc

SEQ ID NO: 2690 - RNA, 20 nt, Artificial Sequence
  synthesized
ugucccugaguguaucacuu

SEQ ID NO: 2691 - RNA, 20 nt, Artificial Sequence
  synthesized
uuggcugagucacugccuuu

SEQ ID NO: 2692 - RNA, 20 nt, Artificial Sequence
  synthesized
aggucuagcccagcccuggg

SEQ ID NO: 2693 - RNA, 20 nt, Artificial Sequence
  synthesized
aggucuagcccggcccuggg

SEQ ID NO: 2694 - RNA, 20 nt, Artificial Sequence
  synthesized
cagcccuggguaggaguggg

SEQ ID NO: 2695 - RNA, 20 nt, Artificial Sequence
  synthesized
ccaggucuagcccagcccug

SEQ ID NO: 2696 - RNA, 20 nt, Artificial Sequence
  synthesized
ccaggucuagcccggcccug

SEQ ID NO: 2697 - RNA, 20 nt, Artificial Sequence
  synthesized
cccacuccuacccagggccg

SEQ ID NO: 2698 - RNA, 20 nt, Artificial Sequence
  synthesized
cccacuccuacccagggcug

SEQ ID NO: 2699 - RNA, 20 nt, Artificial Sequence
  synthesized
ccuacccagggccgggcuag

SEQ ID NO: 2700 - RNA, 20 nt, Artificial Sequence
  synthesized
ccuacccagggcugggcuag

SEQ ID NO: 2701 - RNA, 20 nt, Artificial Sequence
  synthesized
cggcccuggguaggaguggg

SEQ ID NO: 2702 - RNA, 20 nt, Artificial Sequence
  synthesized
cgggcuagaccuggggacag

SEQ ID NO: 2703 - RNA, 20 nt, Artificial Sequence
  synthesized
cuguccccaggucuagccca

SEQ ID NO: 2704 - RNA, 20 nt, Artificial Sequence
  synthesized
cuguccccaggucuagcccg

SEQ ID NO: 2705 - RNA, 20 nt, Artificial Sequence
  synthesized
gccgggcuagaccuggggac

SEQ ID NO: 2706 - RNA, 20 nt, Artificial Sequence
  synthesized
gcugggcuagaccuggggac

SEQ ID NO: 2707 - RNA, 20 nt, Artificial Sequence
  synthesized
gggccgggcuagaccugggg

SEQ ID NO: 2708 - RNA, 20 nt, Artificial Sequence
  synthesized
gggcugggcuagaccugggg

SEQ ID NO: 2709 - RNA, 20 nt, Artificial Sequence
  synthesized
guccccaggucuagcccagc

SEQ ID NO: 2710 - RNA, 20 nt, Artificial Sequence
  synthesized
guccccaggucuagcccggc

SEQ ID NO: 2711 - RNA, 20 nt, Artificial Sequence
  synthesized
uacccagggccgggcuagac

SEQ ID NO: 2712 - RNA, 20 nt, Artificial Sequence
  synthesized
uacccagggcugggcuagac

SEQ ID NO: 2713 - RNA, 20 nt, Artificial Sequence
  synthesized
ugggcuagaccuggggacag

SEQ ID NO: 2714 - RNA, 20 nt, Artificial Sequence
  synthesized
aaaauaccuuggugcccuag

SEQ ID NO: 2715 - RNA, 20 nt, Artificial Sequence
  synthesized
aaaguaccuuggugcccuag

SEQ ID NO: 2716 - RNA, 20 nt, Artificial Sequence
  synthesized
aauaccuuggugcccuagua

SEQ ID NO: 2717 - RNA, 20 nt, Artificial Sequence
  synthesized
agggcaccaagguacuuuaa

SEQ ID NO: 2718 - RNA, 20 nt, Artificial Sequence
  synthesized
agggcaccaagguauuuuaa

SEQ ID NO: 2719 - RNA, 20 nt, Artificial Sequence
  synthesized
aguaccuuggugcccuagua

SEQ ID NO: 2720 - RNA, 20 nt, Artificial Sequence
  synthesized
caccaagguacuuuaaaaaa

SEQ ID NO: 2721 - RNA, 20 nt, Artificial Sequence
  synthesized
ccaagguacuuuaaaaaaag

SEQ ID NO: 2722 - RNA, 20 nt, Artificial Sequence
  synthesized
cuagggcaccaagguacuuu

SEQ ID NO: 2723 - RNA, 20 nt, Artificial Sequence
  synthesized
cuagggcaccaagguauuuu

SEQ ID NO: 2724 - RNA, 20 nt, Artificial Sequence
  synthesized
cuuuuuuuaaaguaccuugg

SEQ ID NO: 2725 - RNA, 20 nt, Artificial Sequence
  synthesized
ggcaccaagguacuuuaaaa

SEQ ID NO: 2726 - RNA, 20 nt, Artificial Sequence
  synthesized
ggcaccaagguauuuuaaaa

SEQ ID NO: 2727 - RNA, 20 nt, Artificial Sequence
  synthesized
ggcccuaacuuuuuuuaaaa

SEQ ID NO: 2728 - RNA, 20 nt, Artificial Sequence
  synthesized
ggcccuaacuuuuuuuaaag

SEQ ID NO: 2729 - RNA, 20 nt, Artificial Sequence
  synthesized
uacuagggcaccaagguacu

SEQ ID NO: 2730 - RNA, 20 nt, Artificial Sequence
  synthesized
uacuagggcaccaagguauu

SEQ ID NO: 2731 - RNA, 20 nt, Artificial Sequence
  synthesized
uuaaaauaccuuggugcccu

SEQ ID NO: 2732 - RNA, 20 nt, Artificial Sequence
  synthesized
uuaaaguaccuuggugcccu

SEQ ID NO: 2733 - RNA, 20 nt, Artificial Sequence
  synthesized
uuuuaaaauaccuuggugcc

SEQ ID NO: 2734 - RNA, 20 nt, Artificial Sequence
  synthesized
uuuuaaaguaccuuggugcc

SEQ ID NO: 2735 - RNA, 20 nt, Artificial Sequence
  synthesized
uuuuuuaaaguaccuuggug

SEQ ID NO: 2736 - RNA, 20 nt, Artificial Sequence
  synthesized
agcccagggccccuccugag

SEQ ID NO: 2737 - RNA, 20 nt, Artificial Sequence
  synthesized
agcccagggccgcuccugag

SEQ ID NO: 2738 - RNA, 20 nt, Artificial Sequence
  synthesized
agcggcccugggcuggggaa

SEQ ID NO: 2739 - RNA, 20 nt, Artificial Sequence
  synthesized
aggccucaggagcggcccug

SEQ ID NO: 2740 - RNA, 20 nt, Artificial Sequence
  synthesized
aggccucaggaggggcccug

SEQ ID NO: 2741 - RNA, 20 nt, Artificial Sequence
  synthesized
aggggcccugggcuggggaa

SEQ ID NO: 2742 - RNA, 20 nt, Artificial Sequence
  synthesized
cagggccccuccugaggccu

SEQ ID NO: 2743 - RNA, 20 nt, Artificial Sequence
  synthesized
cagggccgcuccugaggccu

SEQ ID NO: 2744 - RNA, 20 nt, Artificial Sequence
  synthesized
cccuccugaggccugagcca

SEQ ID NO: 2745 - RNA, 20 nt, Artificial Sequence
  synthesized
cgcuccugaggccugagcca

SEQ ID NO: 2746 - RNA, 20 nt, Artificial Sequence
  synthesized
gccccuccugaggccugagc

SEQ ID NO: 2747 - RNA, 20 nt, Artificial Sequence
  synthesized
gccgcuccugaggccugagc

SEQ ID NO: 2748 - RNA, 20 nt, Artificial Sequence
  synthesized
gccucaggagcggcccuggg

SEQ ID NO: 2749 - RNA, 20 nt, Artificial Sequence
  synthesized
gccucaggaggggcccuggg

SEQ ID NO: 2750 - RNA, 20 nt, Artificial Sequence
  synthesized
gcucaggccucaggagcggc

SEQ ID NO: 2751 - RNA, 20 nt, Artificial Sequence
  synthesized
gcucaggccucaggaggggc

SEQ ID NO: 2752 - RNA, 20 nt, Artificial Sequence
  synthesized
ggagcggcccugggcugggg

SEQ ID NO: 2753 - RNA, 20 nt, Artificial Sequence
  synthesized
ggaggggcccugggcugggg

SEQ ID NO: 2754 - RNA, 20 nt, Artificial Sequence
  synthesized
gggccccuccugaggccuga

SEQ ID NO: 2755 - RNA, 20 nt, Artificial Sequence
  synthesized
gggccgcuccugaggccuga

SEQ ID NO: 2756 - RNA, 20 nt, Artificial Sequence
  synthesized
uggcucaggccucaggagcg

SEQ ID NO: 2757 - RNA, 20 nt, Artificial Sequence
  synthesized
uggcucaggccucaggaggg

SEQ ID NO: 2758 - RNA, 20 nt, Artificial Sequence
  synthesized
uuccccagcccagggccccu

SEQ ID NO: 2759 - RNA, 20 nt, Artificial Sequence
  synthesized
uuccccagcccagggccgcu

SEQ ID NO: 2760 - RNA, 20 nt, Artificial Sequence
  synthesized
uuuuccccagcccagggccc

SEQ ID NO: 2761 - RNA, 20 nt, Artificial Sequence
  synthesized
uuuuccccagcccagggccg

SEQ ID NO: 2762 - RNA, 20 nt, Artificial Sequence
  synthesized
aaaucagauuaggcucaguu

SEQ ID NO: 2763 - RNA, 20 nt, Artificial Sequence
  synthesized
aacugagccuaaucugauuc

SEQ ID NO: 2764 - RNA, 20 nt, Artificial Sequence
  synthesized
aacugagccuaaucugauuu

SEQ ID NO: 2765 - RNA, 20 nt, Artificial Sequence
  synthesized
aaucugauuccugccuguac

SEQ ID NO: 2766 - RNA, 20 nt, Artificial Sequence
  synthesized
aaucugauuucugccuguac

SEQ ID NO: 2767 - RNA, 20 nt, Artificial Sequence
  synthesized
acaggcagaaaucagauuag

SEQ ID NO: 2768 - RNA, 20 nt, Artificial Sequence
  synthesized
acaggcaggaaucagauuag

SEQ ID NO: 2769 - RNA, 20 nt, Artificial Sequence
  synthesized
acguacaggcagaaaucaga

SEQ ID NO: 2770 - RNA, 20 nt, Artificial Sequence
  synthesized
acguacaggcaggaaucaga

SEQ ID NO: 2771 - RNA, 20 nt, Artificial Sequence
  synthesized
agaaaucagauuaggcucag

SEQ ID NO: 2772 - RNA, 20 nt, Artificial Sequence
  synthesized
aggaaucagauuaggcucag

SEQ ID NO: 2773 - RNA, 20 nt, Artificial Sequence
  synthesized
aggcagaaaucagauuaggc

SEQ ID NO: 2774 - RNA, 20 nt, Artificial Sequence
  synthesized
aggcaggaaucagauuaggc

SEQ ID NO: 2775 - RNA, 20 nt, Artificial Sequence
  synthesized
auacguacaggcagaaauca

SEQ ID NO: 2776 - RNA, 20 nt, Artificial Sequence
  synthesized
auacguacaggcaggaauca

SEQ ID NO: 2777 - RNA, 20 nt, Artificial Sequence
  synthesized
aucugauuccugccuguacg

SEQ ID NO: 2778 - RNA, 20 nt, Artificial Sequence
  synthesized
auuccugccuguacguauuc

SEQ ID NO: 2779 - RNA, 20 nt, Artificial Sequence
  synthesized
auuucugccuguacguauuc

SEQ ID NO: 2780 - RNA, 20 nt, Artificial Sequence
  synthesized
ccugccuguacguauucaua

SEQ ID NO: 2781 - RNA, 20 nt, Artificial Sequence
  synthesized
cuaaucugauuccugccugu

SEQ ID NO: 2782 - RNA, 20 nt, Artificial Sequence
  synthesized
cuaaucugauuucugccugu

SEQ ID NO: 2783 - RNA, 20 nt, Artificial Sequence
  synthesized
cugagccuaaucugauuccu

SEQ ID NO: 2784 - RNA, 20 nt, Artificial Sequence
  synthesized
cugagccuaaucugauuucu

SEQ ID NO: 2785 - RNA, 20 nt, Artificial Sequence
  synthesized
cugauuccugccuguacgua

SEQ ID NO: 2786 - RNA, 20 nt, Artificial Sequence
  synthesized
gaauacguacaggcagaaau

SEQ ID NO: 2787 - RNA, 20 nt, Artificial Sequence
  synthesized
gaauacguacaggcaggaau

SEQ ID NO: 2788 - RNA, 20 nt, Artificial Sequence
  synthesized
gaaucagauuaggcucaguu

SEQ ID NO: 2789 - RNA, 20 nt, Artificial Sequence
  synthesized
gagccuaaucugauuccugc

SEQ ID NO: 2790 - RNA, 20 nt, Artificial Sequence
  synthesized
gagccuaaucugauuucugc

SEQ ID NO: 2791 - RNA, 20 nt, Artificial Sequence
  synthesized
gcagaaaucagauuaggcuc

SEQ ID NO: 2792 - RNA, 20 nt, Artificial Sequence
  synthesized
gcaggaaucagauuaggcuc

SEQ ID NO: 2793 - RNA, 20 nt, Artificial Sequence
  synthesized
uaugaauacguacaggcagg

SEQ ID NO: 2794 - RNA, 20 nt, Artificial Sequence
  synthesized
uccugccuguacguauucau

SEQ ID NO: 2795 - RNA, 20 nt, Artificial Sequence
  synthesized
ugaauacguacaggcaggaa

SEQ ID NO: 2796 - RNA, 20 nt, Artificial Sequence
  synthesized
ugauuccugccuguacguau

SEQ ID NO: 2797 - RNA, 20 nt, Artificial Sequence
  synthesized
ugauuucugccuguacguau

SEQ ID NO: 2798 - RNA, 20 nt, Artificial Sequence
  synthesized
uuccugccuguacguauuca

SEQ ID NO: 2799 - RNA, 20 nt, Artificial Sequence
  synthesized
uucugccuguacguauucau

SEQ ID NO: 2800 - RNA, 20 nt, Artificial Sequence
  synthesized
aagaucagugcagaccacgg

SEQ ID NO: 2801 - RNA, 20 nt, Artificial Sequence
  synthesized
aagccugguucacuggucaa

SEQ ID NO: 2802 - RNA, 20 nt, Artificial Sequence
  synthesized
aagccugguucacuggucag

SEQ ID NO: 2803 - RNA, 20 nt, Artificial Sequence
  synthesized
aggaucagugcagaccacgg

SEQ ID NO: 2804 - RNA, 20 nt, Artificial Sequence
  synthesized
cacugauccugaccagugaa

SEQ ID NO: 2805 - RNA, 20 nt, Artificial Sequence
  synthesized
cacugaucuugaccagugaa

SEQ ID NO: 2806 - RNA, 20 nt, Artificial Sequence
  synthesized
cacuggucaagaucagugca

SEQ ID NO: 2807 - RNA, 20 nt, Artificial Sequence
  synthesized
cacuggucaggaucagugca

SEQ ID NO: 2808 - RNA, 20 nt, Artificial Sequence
  synthesized
ccguggucugcacugauccu

SEQ ID NO: 2809 - RNA, 20 nt, Artificial Sequence
  synthesized
ccguggucugcacugaucuu

SEQ ID NO: 2810 - RNA, 20 nt, Artificial Sequence
  synthesized
cugaccagugaaccaggcuu

SEQ ID NO: 2811 - RNA, 20 nt, Artificial Sequence
  synthesized
cuggucaagaucagugcaga

SEQ ID NO: 2812 - RNA, 20 nt, Artificial Sequence
  synthesized
cuggucaggaucagugcaga

SEQ ID NO: 2813 - RNA, 20 nt, Artificial Sequence
  synthesized
gauccugaccagugaaccag

SEQ ID NO: 2814 - RNA, 20 nt, Artificial Sequence
  synthesized
gaucuugaccagugaaccag

SEQ ID NO: 2815 - RNA, 20 nt, Artificial Sequence
  synthesized
gccugguucacuggucaaga

SEQ ID NO: 2816 - RNA, 20 nt, Artificial Sequence
  synthesized
gccugguucacuggucagga

SEQ ID NO: 2817 - RNA, 20 nt, Artificial Sequence
  synthesized
ggucaagaucagugcagacc

SEQ ID NO: 2818 - RNA, 20 nt, Artificial Sequence
  synthesized
ggucaggaucagugcagacc

SEQ ID NO: 2819 - RNA, 20 nt, Artificial Sequence
  synthesized
gguucacuggucaagaucag

SEQ ID NO: 2820 - RNA, 20 nt, Artificial Sequence
  synthesized
gguucacuggucaggaucag

SEQ ID NO: 2821 - RNA, 20 nt, Artificial Sequence
  synthesized
guggucugcacugauccuga

SEQ ID NO: 2822 - RNA, 20 nt, Artificial Sequence
  synthesized
guggucugcacugaucuuga

SEQ ID NO: 2823 - RNA, 20 nt, Artificial Sequence
  synthesized
uccugaccagugaaccaggc

SEQ ID NO: 2824 - RNA, 20 nt, Artificial Sequence
  synthesized
ucuugaccagugaaccaggc

SEQ ID NO: 2825 - RNA, 20 nt, Artificial Sequence
  synthesized
ugcacugauccugaccagug

SEQ ID NO: 2826 - RNA, 20 nt, Artificial Sequence
  synthesized
ugcacugaucuugaccagug

SEQ ID NO: 2827 - RNA, 20 nt, Artificial Sequence
  synthesized
uucacuggucaagaucagug

SEQ ID NO: 2828 - RNA, 20 nt, Artificial Sequence
  synthesized
uucacuggucaggaucagug

SEQ ID NO: 2829 - RNA, 20 nt, Artificial Sequence
  synthesized
uugaccagugaaccaggcuu

SEQ ID NO: 2830 - RNA, 20 nt, Artificial Sequence
  synthesized
acgacuggauuaguauacca

SEQ ID NO: 2831 - RNA, 20 nt, Artificial Sequence
  synthesized
acgacuggauuaguauccca

SEQ ID NO: 2832 - RNA, 20 nt, Artificial Sequence
  synthesized
auuaguauaccacuggugua

SEQ ID NO: 2833 - RNA, 20 nt, Artificial Sequence
  synthesized
auuaguaucccacuggugua

SEQ ID NO: 2834 - RNA, 20 nt, Artificial Sequence
  synthesized
ccagugggauacuaauccag

SEQ ID NO: 2835 - RNA, 20 nt, Artificial Sequence
  synthesized
ccagugguauacuaauccag

SEQ ID NO: 2836 - RNA, 20 nt, Artificial Sequence
  synthesized
ccuguguauacaccaguggg

SEQ ID NO: 2837 - RNA, 20 nt, Artificial Sequence
  synthesized
ccuguguauacaccaguggu

SEQ ID NO: 2838 - RNA, 20 nt, Artificial Sequence
  synthesized
cuacgacuggauuaguauac

SEQ ID NO: 2839 - RNA, 20 nt, Artificial Sequence
  synthesized
cuacgacuggauuaguaucc

SEQ ID NO: 2840 - RNA, 20 nt, Artificial Sequence
  synthesized
cuggauuaguauaccacugg

SEQ ID NO: 2841 - RNA, 20 nt, Artificial Sequence
  synthesized
cuggauuaguaucccacugg

SEQ ID NO: 2842 - RNA, 20 nt, Artificial Sequence
  synthesized
ggauacuaauccagucguag

SEQ ID NO: 2843 - RNA, 20 nt, Artificial Sequence
  synthesized
ggauuaguauaccacuggug

SEQ ID NO: 2844 - RNA, 20 nt, Artificial Sequence
  synthesized
ggauuaguaucccacuggug

SEQ ID NO: 2845 - RNA, 20 nt, Artificial Sequence
  synthesized
guauaccacugguguauaca

SEQ ID NO: 2846 - RNA, 20 nt, Artificial Sequence
  synthesized
guauacuaauccagucguag

SEQ ID NO: 2847 - RNA, 20 nt, Artificial Sequence
  synthesized
guaucccacugguguauaca

SEQ ID NO: 2848 - RNA, 20 nt, Artificial Sequence
  synthesized
uacaccagugggauacuaau

SEQ ID NO: 2849 - RNA, 20 nt, Artificial Sequence
  synthesized
uacaccagugguauacuaau

SEQ ID NO: 2850 - RNA, 20 nt, Artificial Sequence
  synthesized
uaguauaccacugguguaua

SEQ ID NO: 2851 - RNA, 20 nt, Artificial Sequence
  synthesized
uaguaucccacugguguaua

SEQ ID NO: 2852 - RNA, 20 nt, Artificial Sequence
  synthesized
uauacaccagugggauacua

SEQ ID NO: 2853 - RNA, 20 nt, Artificial Sequence
  synthesized
uauacaccagugguauacua

SEQ ID NO: 2854 - RNA, 20 nt, Artificial Sequence
  synthesized
uguauacaccagugggauac

SEQ ID NO: 2855 - RNA, 20 nt, Artificial Sequence
  synthesized
uguauacaccagugguauac

SEQ ID NO: 2856 - RNA, 20 nt, Artificial Sequence
  synthesized
aacaggcagacauccuguau

SEQ ID NO: 2857 - RNA, 20 nt, Artificial Sequence
  synthesized
aacaggcagauauccuguau

SEQ ID NO: 2858 - RNA, 20 nt, Artificial Sequence
  synthesized
aauuauacaggauaucugcc

SEQ ID NO: 2859 - RNA, 20 nt, Artificial Sequence
  synthesized
aauuauacaggaugucugcc

SEQ ID NO: 2860 - RNA, 20 nt, Artificial Sequence
  synthesized
acaggauaucugccuguuuc

SEQ ID NO: 2861 - RNA, 20 nt, Artificial Sequence
  synthesized
acaggaugucugccuguuuc

SEQ ID NO: 2862 - RNA, 20 nt, Artificial Sequence
  synthesized
acuugaaauuauacaggaug

SEQ ID NO: 2863 - RNA, 20 nt, Artificial Sequence
  synthesized
aggaaacaggcagacauccu

SEQ ID NO: 2864 - RNA, 20 nt, Artificial Sequence
  synthesized
aggaaacaggcagauauccu

SEQ ID NO: 2865 - RNA, 20 nt, Artificial Sequence
  synthesized
aggauaucugccuguuuccu

SEQ ID NO: 2866 - RNA, 20 nt, Artificial Sequence
  synthesized
aggaugucugccuguuuccu

SEQ ID NO: 2867 - RNA, 20 nt, Artificial Sequence
  synthesized
aggcaggaaacaggcagaca

SEQ ID NO: 2868 - RNA, 20 nt, Artificial Sequence
  synthesized
aggcaggaaacaggcagaua

SEQ ID NO: 2869 - RNA, 20 nt, Artificial Sequence
  synthesized
auacaggauaucugccuguu

SEQ ID NO: 2870 - RNA, 20 nt, Artificial Sequence
  synthesized
auacaggaugucugccuguu

SEQ ID NO: 2871 - RNA, 20 nt, Artificial Sequence
  synthesized
cagacauccuguauaauuuc

SEQ ID NO: 2872 - RNA, 20 nt, Artificial Sequence
  synthesized
cagauauccuguauaauuuc

SEQ ID NO: 2873 - RNA, 20 nt, Artificial Sequence
  synthesized
caggcagacauccuguauaa

SEQ ID NO: 2874 - RNA, 20 nt, Artificial Sequence
  synthesized
caggcagauauccuguauaa

SEQ ID NO: 2875 - RNA, 20 nt, Artificial Sequence
  synthesized
gaaacaggcagacauccugu

SEQ ID NO: 2876 - RNA, 20 nt, Artificial Sequence
  synthesized
gaaacaggcagauauccugu

SEQ ID NO: 2877 - RNA, 20 nt, Artificial Sequence
  synthesized
gaaauuauacaggauaucug

SEQ ID NO: 2878 - RNA, 20 nt, Artificial Sequence
  synthesized
gaaauuauacaggaugucug

SEQ ID NO: 2879 - RNA, 20 nt, Artificial Sequence
  synthesized
gacauccuguauaauuucaa

SEQ ID NO: 2880 - RNA, 20 nt, Artificial Sequence
  synthesized
gauaucugccuguuuccugc

SEQ ID NO: 2881 - RNA, 20 nt, Artificial Sequence
  synthesized
gaugucugccuguuuccugc

SEQ ID NO: 2882 - RNA, 20 nt, Artificial Sequence
  synthesized
gcaggaaacaggcagacauc

SEQ ID NO: 2883 - RNA, 20 nt, Artificial Sequence
  synthesized
gcaggaaacaggcagauauc

SEQ ID NO: 2884 - RNA, 20 nt, Artificial Sequence
  synthesized
uaucugccuguuuccugccu

SEQ ID NO: 2885 - RNA, 20 nt, Artificial Sequence
  synthesized
ugucugccuguuuccugccu

SEQ ID NO: 2886 - RNA, 20 nt, Artificial Sequence
  synthesized
uuauacaggauaucugccug

SEQ ID NO: 2887 - RNA, 20 nt, Artificial Sequence
  synthesized
uuauacaggaugucugccug

SEQ ID NO: 2888 - RNA, 20 nt, Artificial Sequence
  synthesized
uugaaauuauacaggauguc

SEQ ID NO: 2889 - RNA, 20 nt, Artificial Sequence
  synthesized
acagugagccaagguugccc

SEQ ID NO: 2890 - RNA, 20 nt, Artificial Sequence
  synthesized
agccaagguugcccccacug

SEQ ID NO: 2891 - RNA, 20 nt, Artificial Sequence
  synthesized
agugagccaagguugccccc

SEQ ID NO: 2892 - RNA, 20 nt, Artificial Sequence
  synthesized
agugcagugggggcaaccuu

SEQ ID NO: 2893 - RNA, 20 nt, Artificial Sequence
  synthesized
cagugggggcaaccuuggcu

SEQ ID NO: 2894 - RNA, 20 nt, Artificial Sequence
  synthesized
ccaagguugcccccacugca

SEQ ID NO: 2895 - RNA, 20 nt, Artificial Sequence
  synthesized
ggagugcagugggggcaacc

SEQ ID NO: 2896 - RNA, 20 nt, Artificial Sequence
  synthesized
gggcaaccuuggcucacugu

SEQ ID NO: 2897 - RNA, 20 nt, Artificial Sequence
  synthesized
gggcaaucuuggcucacugu

SEQ ID NO: 2898 - RNA, 20 nt, Artificial Sequence
  synthesized
gggggcaaccuuggcucacu

SEQ ID NO: 2899 - RNA, 20 nt, Artificial Sequence
  synthesized
gguuacagugagccaagauu

SEQ ID NO: 2900 - RNA, 20 nt, Artificial Sequence
  synthesized
gguuacagugagccaagguu

SEQ ID NO: 2901 - RNA, 20 nt, Artificial Sequence
  synthesized
gugggggcaaccuuggcuca

SEQ ID NO: 2902 - RNA, 20 nt, Artificial Sequence
  synthesized
ugagccaagguugcccccac

SEQ ID NO: 2903 - RNA, 20 nt, Artificial Sequence
  synthesized
ugcagugggggcaaccuugg

SEQ ID NO: 2904 - RNA, 20 nt, Artificial Sequence
  synthesized
uuacagugagccaagguugc

SEQ ID NO: 2905 - RNA, 20 nt, Artificial Sequence
  synthesized
aagaacacaagaggagcuuc

SEQ ID NO: 2906 - RNA, 20 nt, Artificial Sequence
  synthesized
acaagaacacaagaggagcu

SEQ ID NO: 2907 - RNA, 20 nt, Artificial Sequence
  synthesized
acgagaacacaagaggagcu

SEQ ID NO: 2908 - RNA, 20 nt, Artificial Sequence
  synthesized
agcgccuucuacaagaacac

SEQ ID NO: 2909 - RNA, 20 nt, Artificial Sequence
  synthesized
agcgccuucuacgagaacac

SEQ ID NO: 2910 - RNA, 20 nt, Artificial Sequence
  synthesized
auugagcgccuucuacaaga

SEQ ID NO: 2911 - RNA, 20 nt, Artificial Sequence
  synthesized
auugagcgccuucuacgaga

SEQ ID NO: 2912 - RNA, 20 nt, Artificial Sequence
  synthesized
cgccuucuacaagaacacaa

SEQ ID NO: 2913 - RNA, 20 nt, Artificial Sequence
  synthesized
cgccuucuacgagaacacaa

SEQ ID NO: 2914 - RNA, 20 nt, Artificial Sequence
  synthesized
cuacaagaacacaagaggag

SEQ ID NO: 2915 - RNA, 20 nt, Artificial Sequence
  synthesized
cuacgagaacacaagaggag

SEQ ID NO: 2916 - RNA, 20 nt, Artificial Sequence
  synthesized
cuccucuuguguucucguag

SEQ ID NO: 2917 - RNA, 20 nt, Artificial Sequence
  synthesized
cuccucuuguguucuuguag

SEQ ID NO: 2918 - RNA, 20 nt, Artificial Sequence
  synthesized
gaagcuccucuuguguucuc

SEQ ID NO: 2919 - RNA, 20 nt, Artificial Sequence
  synthesized
gaagcuccucuuguguucuu

SEQ ID NO: 2920 - RNA, 20 nt, Artificial Sequence
  synthesized
gagaacacaagaggagcuuc

SEQ ID NO: 2921 - RNA, 20 nt, Artificial Sequence
  synthesized
guguucucguagaaggcgcu

SEQ ID NO: 2922 - RNA, 20 nt, Artificial Sequence
  synthesized
guguucuuguagaaggcgcu

SEQ ID NO: 2923 - RNA, 20 nt, Artificial Sequence
  synthesized
guucucguagaaggcgcuca

SEQ ID NO: 2924 - RNA, 20 nt, Artificial Sequence
  synthesized
guucuuguagaaggcgcuca

SEQ ID NO: 2925 - RNA, 20 nt, Artificial Sequence
  synthesized
ucguagaaggcgcucaauaa

SEQ ID NO: 2926 - RNA, 20 nt, Artificial Sequence
  synthesized
ucucguagaaggcgcucaau

SEQ ID NO: 2927 - RNA, 20 nt, Artificial Sequence
  synthesized
ucuuguagaaggcgcucaau

SEQ ID NO: 2928 - RNA, 20 nt, Artificial Sequence
  synthesized
ucuuguguucucguagaagg

SEQ ID NO: 2929 - RNA, 20 nt, Artificial Sequence
  synthesized
ucuuguguucuuguagaagg

SEQ ID NO: 2930 - RNA, 20 nt, Artificial Sequence
  synthesized
ugagcgccuucuacaagaac

SEQ ID NO: 2931 - RNA, 20 nt, Artificial Sequence
  synthesized
ugagcgccuucuacgagaac

SEQ ID NO: 2932 - RNA, 20 nt, Artificial Sequence
  synthesized
uucuacaagaacacaagagg

SEQ ID NO: 2933 - RNA, 20 nt, Artificial Sequence
  synthesized
uucuacgagaacacaagagg

SEQ ID NO: 2934 - RNA, 20 nt, Artificial Sequence
  synthesized
uuguagaaggcgcucaauaa

SEQ ID NO: 2935 - RNA, 20 nt, Artificial Sequence
  synthesized
aauucuccagggugccccag

SEQ ID NO: 2936 - RNA, 20 nt, Artificial Sequence
  synthesized
aauucuccggggugccccag

SEQ ID NO: 2937 - RNA, 20 nt, Artificial Sequence
  synthesized
aggccacuggggcaccccgg

SEQ ID NO: 2938 - RNA, 20 nt, Artificial Sequence
  synthesized
aggccacuggggcacccugg

SEQ ID NO: 2939 - RNA, 20 nt, Artificial Sequence
  synthesized
agggugccccaguggccugc

SEQ ID NO: 2940 - RNA, 20 nt, Artificial Sequence
  synthesized
augcuugaaauucuccaggg

SEQ ID NO: 2941 - RNA, 20 nt, Artificial Sequence
  synthesized
augcuugaaauucuccgggg

SEQ ID NO: 2942 - RNA, 20 nt, Artificial Sequence
  synthesized
caccccggagaauuucaagc

SEQ ID NO: 2943 - RNA, 20 nt, Artificial Sequence
  synthesized
cacccuggagaauuucaagc

SEQ ID NO: 2944 - RNA, 20 nt, Artificial Sequence
  synthesized
cacuggggcaccccggagaa

SEQ ID NO: 2945 - RNA, 20 nt, Artificial Sequence
  synthesized
cacuggggcacccuggagaa

SEQ ID NO: 2946 - RNA, 20 nt, Artificial Sequence
  synthesized
ccagggugccccaguggccu

SEQ ID NO: 2947 - RNA, 20 nt, Artificial Sequence
  synthesized
ccccggagaauuucaagcau

SEQ ID NO: 2948 - RNA, 20 nt, Artificial Sequence
  synthesized
cccuggagaauuucaagcau

SEQ ID NO: 2949 - RNA, 20 nt, Artificial Sequence
  synthesized
ccggagaauuucaagcauaa

SEQ ID NO: 2950 - RNA, 20 nt, Artificial Sequence
  synthesized
ccggggugccccaguggccu

SEQ ID NO: 2951 - RNA, 20 nt, Artificial Sequence
  synthesized
cuccagggugccccaguggc

SEQ ID NO: 2952 - RNA, 20 nt, Artificial Sequence
  synthesized
cuccggggugccccaguggc

SEQ ID NO: 2953 - RNA, 20 nt, Artificial Sequence
  synthesized
cuggagaauuucaagcauaa

SEQ ID NO: 2954 - RNA, 20 nt, Artificial Sequence
  synthesized
cuggggcaccccggagaauu

SEQ ID NO: 2955 - RNA, 20 nt, Artificial Sequence
  synthesized
cuggggcacccuggagaauu

SEQ ID NO: 2956 - RNA, 20 nt, Artificial Sequence
  synthesized
gaaauucuccagggugcccc

SEQ ID NO: 2957 - RNA, 20 nt, Artificial Sequence
  synthesized
gaaauucuccggggugcccc

SEQ ID NO: 2958 - RNA, 20 nt, Artificial Sequence
  synthesized
gcaggccacuggggcacccc

SEQ ID NO: 2959 - RNA, 20 nt, Artificial Sequence
  synthesized
gcaggccacuggggcacccu

SEQ ID NO: 2960 - RNA, 20 nt, Artificial Sequence
  synthesized
gccacuggggcaccccggag

SEQ ID NO: 2961 - RNA, 20 nt, Artificial Sequence
  synthesized
gccacuggggcacccuggag

SEQ ID NO: 2962 - RNA, 20 nt, Artificial Sequence
  synthesized
gcuugaaauucuccagggug

SEQ ID NO: 2963 - RNA, 20 nt, Artificial Sequence
  synthesized
gcuugaaauucuccggggug

SEQ ID NO: 2964 - RNA, 20 nt, Artificial Sequence
  synthesized
ggcaccccggagaauuucaa

SEQ ID NO: 2965 - RNA, 20 nt, Artificial Sequence
  synthesized
ggcacccuggagaauuucaa

SEQ ID NO: 2966 - RNA, 20 nt, Artificial Sequence
  synthesized
ggggcaccccggagaauuuc

SEQ ID NO: 2967 - RNA, 20 nt, Artificial Sequence
  synthesized
ggggcacccuggagaauuuc

SEQ ID NO: 2968 - RNA, 20 nt, Artificial Sequence
  synthesized
ggggugccccaguggccugc

SEQ ID NO: 2969 - RNA, 20 nt, Artificial Sequence
  synthesized
uuaugcuugaaauucuccag

SEQ ID NO: 2970 - RNA, 20 nt, Artificial Sequence
  synthesized
uuaugcuugaaauucuccgg

SEQ ID NO: 2971 - RNA, 20 nt, Artificial Sequence
  synthesized
uucuccagggugccccagug

SEQ ID NO: 2972 - RNA, 20 nt, Artificial Sequence
  synthesized
uucuccggggugccccagug

SEQ ID NO: 2973 - RNA, 20 nt, Artificial Sequence
  synthesized
uugaaauucuccagggugcc

SEQ ID NO: 2974 - RNA, 20 nt, Artificial Sequence
  synthesized
uugaaauucuccggggugcc

SEQ ID NO: 2975 - RNA, 20 nt, Artificial Sequence
  synthesized
aagggaccuuccauacuuau

SEQ ID NO: 2976 - RNA, 20 nt, Artificial Sequence
  synthesized
aagguaccuucauuucaaau

SEQ ID NO: 2977 - RNA, 20 nt, Artificial Sequence
  synthesized
aagguaccuuccauacuuau

SEQ ID NO: 2978 - RNA, 20 nt, Artificial Sequence
  synthesized
aaggucccuucauuucaaau

SEQ ID NO: 2979 - RNA, 20 nt, Artificial Sequence
  synthesized
aaguauggaagguaccuuca

SEQ ID NO: 2980 - RNA, 20 nt, Artificial Sequence
  synthesized
aaguauggaaggucccuuca

SEQ ID NO: 2981 - RNA, 20 nt, Artificial Sequence
  synthesized
aaugaagggaccuuccauac

SEQ ID NO: 2982 - RNA, 20 nt, Artificial Sequence
  synthesized
aaugaagguaccuuccauac

SEQ ID NO: 2983 - RNA, 20 nt, Artificial Sequence
  synthesized
auaaguauggaagguaccuu

SEQ ID NO: 2984 - RNA, 20 nt, Artificial Sequence
  synthesized
auaaguauggaaggucccuu

SEQ ID NO: 2985 - RNA, 20 nt, Artificial Sequence
  synthesized
auggaagguaccuucauuuc

SEQ ID NO: 2986 - RNA, 20 nt, Artificial Sequence
  synthesized
auggaaggucccuucauuuc

SEQ ID NO: 2987 - RNA, 20 nt, Artificial Sequence
  synthesized
auuugaaaugaagggaccuu

SEQ ID NO: 2988 - RNA, 20 nt, Artificial Sequence
  synthesized
auuugaaaugaagguaccuu

SEQ ID NO: 2989 - RNA, 20 nt, Artificial Sequence
  synthesized
cagcauaaguauggaaggua

SEQ ID NO: 2990 - RNA, 20 nt, Artificial Sequence
  synthesized
cagcauaaguauggaagguc

SEQ ID NO: 2991 - RNA, 20 nt, Artificial Sequence
  synthesized
gaaaugaagggaccuuccau

SEQ ID NO: 2992 - RNA, 20 nt, Artificial Sequence
  synthesized
gaaaugaagguaccuuccau

SEQ ID NO: 2993 - RNA, 20 nt, Artificial Sequence
  synthesized
gaccuuccauacuuaugcug

SEQ ID NO: 2994 - RNA, 20 nt, Artificial Sequence
  synthesized
gcauaaguauggaagguacc

SEQ ID NO: 2995 - RNA, 20 nt, Artificial Sequence
  synthesized
gcauaaguauggaagguccc

SEQ ID NO: 2996 - RNA, 20 nt, Artificial Sequence
  synthesized
ggaagguaccuucauuucaa

SEQ ID NO: 2997 - RNA, 20 nt, Artificial Sequence
  synthesized
ggaaggucccuucauuucaa

SEQ ID NO: 2998 - RNA, 20 nt, Artificial Sequence
  synthesized
gggaccuuccauacuuaugc

SEQ ID NO: 2999 - RNA, 20 nt, Artificial Sequence
  synthesized
gguaccuucauuucaaauac

SEQ ID NO: 3000 - RNA, 20 nt, Artificial Sequence
  synthesized
gguaccuuccauacuuaugc

SEQ ID NO: 3001 - RNA, 20 nt, Artificial Sequence
  synthesized
ggucccuucauuucaaauac

SEQ ID NO: 3002 - RNA, 20 nt, Artificial Sequence
  synthesized
guauggaagguaccuucauu

SEQ ID NO: 3003 - RNA, 20 nt, Artificial Sequence
  synthesized
guauggaaggucccuucauu

SEQ ID NO: 3004 - RNA, 20 nt, Artificial Sequence
  synthesized
guauuugaaaugaagggacc

SEQ ID NO: 3005 - RNA, 20 nt, Artificial Sequence
  synthesized
guauuugaaaugaagguacc

SEQ ID NO: 3006 - RNA, 20 nt, Artificial Sequence
  synthesized
uaccuucauuucaaauacca

SEQ ID NO: 3007 - RNA, 20 nt, Artificial Sequence
  synthesized
uaccuuccauacuuaugcug

SEQ ID NO: 3008 - RNA, 20 nt, Artificial Sequence
  synthesized
ucccuucauuucaaauacca

SEQ ID NO: 3009 - RNA, 20 nt, Artificial Sequence
  synthesized
ugaagggaccuuccauacuu

SEQ ID NO: 3010 - RNA, 20 nt, Artificial Sequence
  synthesized
ugaagguaccuuccauacuu

1-40. (canceled)

41. A method for inactivating a mutant Bestrophin 1 (BEST1) allele in a cell, the method comprising delivering to the cell a composition comprising
a) an RNA molecule which comprises a guide sequence portion having 17-24 nucleotides and targets a rs1800009 single nucleotide polymorphism (SNP) position in the mutant BEST1 allele; and
b) a CRISPR nuclease,
wherein the RNA molecule and the CRIPSR nuclease form a complex that creates a DNA break in the mutant BEST1 allele.

42. The method of claim 41, wherein the RNA molecule further comprises a portion having a sequence which binds to a CRISPR nuclease.

43. The method of claim 41, wherein the RNA molecule further comprises one or more linker portions.

44. The method of claim 41, wherein the RNA molecule is up to 300 nucleotides in length.

45. The method of claim 41, wherein the composition further comprises a tracrRNA molecule.

46. The method of claim 41, wherein the composition further comprises a second RNA molecule comprising a guide sequence portion.

47. The method of claim 46, wherein the guide sequence portion of the second RNA molecule comprises 17-24 nucleotides and comprises 17-20 contiguous nucleotides set forth in any one of SEQ ID NOs: 1-3010.

48. The method of claim 46, wherein the 17-24 nucleotides of the guide sequence portion of the second RNA molecule are in a different sequence from the sequence of the guide sequence portion of the first RNA molecule.

49. The method of claim 46, wherein the second RNA molecule targets a sequence present in both a mutated allele and a functional allele.

50. The method of claim 46, wherein the second RNA molecule targets an intron.

51. The method of claim 41, further comprising subjecting the mutant allele to insertion or deletion by an error prone non-homologous end joining (NHEJ) mechanism, generating a frameshift in the mutated allele’s sequence.

52. The method of claim 51, wherein the frameshift creates an early stop codon in the mutated allele.

53. The method of claim 51, wherein the frameshift results in nonsense-mediated mRNA decay of a transcript of the mutant allele.

54. The method of claim 41, wherein the inactivating results in a truncated protein encoded by the mutated allele and a functional protein encoded by the functional allele.

55. The method of claim 41, wherein the guide sequence portion of the RNA molecule comprises 17-20 contiguous nucleotides set forth in any one of SEQ ID NOs: 1, 2, 102-109, 715, 716, and 960-991.

56. The method of claim 41, wherein the guide sequence portion of the RNA molecule comprises 17-20 contiguous nucleotides set forth in SEQ ID NO: 108 or SEQ ID NO: 109.

57. The method of claim 41, wherein the cell comprises a mutant BEST1 allele and a functional BEST1 allele.

58. The method of claim 57, wherein the sequence of the rs1800009 SNP position in the mutant BEST1 allele differs from the sequence of the rs1800009 SNP position in the functional BEST1 allele.

59. The method of claim 41, wherein the CRISPR nuclease utilizes a NGG protospacer adjacent motif (PAM).

60. The method of claim 41, wherein the CRISPR nuclease is a Streptococcus pyogenes Cas9 nuclease or a Staphylococcus aureus Cas9 nuclease.
